United States Patent Application Publication US 2024/0268394 A1 - sequence listing, part 4

SEQ ID NO: 45 - DNA, 605713 bp, Pseudomonas nodulensis
  misc_feature (884)..(884): n is a, c, g, or t
  misc_feature (891)..(919): n is a, c, g, or t
  misc_feature (925)..(925): n is a, c, g, or t
  misc_feature (88612)..(88646): n is a, c, g, or t
  misc_feature (178609)..(178650): n is a, c, g, or t
  misc_feature (298517)..(298890): n is a, c, g, or t
  misc_feature (352903)..(352903): n is a, c, g, or t
  misc_feature (352906)..(352906): n is a, c, g, or t
  misc_feature (389280)..(389314): n is a, c, g, or t
  misc_feature (397563)..(397640): n is a, c, g, or t
  misc_feature (406912)..(406912): n is a, c, g, or t
  misc_feature (506689)..(506689): n is a, c, g, or t
  misc_feature (544886)..(544886): n is a, c, g, or t
  misc_feature (579866)..(579907): n is a, c, g, or t
tgacacccgcccagcgccacgagggaaaagaccgggaaatcttggcccggagggcggcaatctatgggcaagcgagagaaaaaaggcctgaaaggtggtcaggcgagacacgcaactggaaccctatcgggacggtgtacctcaatcccgaaagggagctgacagttgtcgtgaaggtcgcctagcaagacgggagacacgacaactaccttgaaaaacgccggtatccacgatgcgaagcgagtcgctcttgatcctgcttttgatctaaggcgccccgtcaaacacgctggccggaattcgacagggatttggggggtaaaccggcagggatgccggtttagccgccccgcgccatggatggcgcgtggcggcggccccccaaatacctgtcggattacgggcacaccgagcctaggcgaggtgccgagtgttggggcaagagcgttttgcttacttttgactgggccggcattccggcttttcaaaagtgagccgccgtaagggcggaaccattagcagccgttacctaaataacggatatgtacctggtctgatccaacattctggtcggctgtcaggccgccttcgcgagcaagcccgctcccacatttggatcgcggggcaacagttggagagtggttggctgtcaggccgacttcgcaggcaagccagctcccacatttggatcgtggggtggcagttagagagcggttggctgtcaggccgacttcgcaggcaagccagctcccacatttggatcgtggggtggcagttagagagcggttggctgtcaggccgacttcgcaggcaagccagctcccacatttggatcgtggggtggcagttagagagcggtcggctgtcaggccgtcttcgcaggncggttgnnnnnnnnnnnnnnnnnnnnnnnnnnnnngcaagnggttggctgtcaggccgacttcgcaggcaagccagctcccacatttggatcgtggggtggcagttagagagcggttggctgtcaggccgacttcgcaggcaagccagctcccacatttggatcgtggggtggcagttagagagcggtcggctgtcaggccgtcttcgcaggtaagccagctcccgcatttggatcgtggggtggcagttagagagcggtcggctgtcaggccgtcttcgcaggcaagccagctcccacatttggatcgcggggcaacagttggagagtggtcggcagtcacaacagcgtgcgctccagcgcctttttccacgcagcataacgccccgccatagcaggatcatcctgcggctcaaaccgctcccgctgccgctccagcgcgcccaacgcgtcatcactcccccacacacccaacgccctccccgccaagtgcgccgcgcccagcgccgacacttccggcgacaggctgcgcaccaccggacgttgcaacagatcggccaaaaactgcatcaaccaacggttacgcgtcgcaccgccgtccacccacaactccttcaacgggctaccgatgtcctgctgcatagcctcaaagacatcgcgaatctgataaccaatcgactccagcgacgcccgcaggatatgcgcgccggaggtggcctcggtcagcccgcagatcaaaccgcgcgcatcagcctgccagtgcggtgcacccagcccggacagcgccggcacaaaatacacaccaccattgtccggcagttgcgcagcctgctcggtgagagcatccagggattctcccgccaccaggcgcgaggcccactgcacggcggcgcccgtatggacgatgttgccttccatgccgaacgtcggttggccgccgtcgtgccaggccagcgtggtggacaaaccgtgagtcgaggcaatcgggccgctcatgggcgtcattaaggaagaaccggtacccagtgtcgccttcaccagccccggcgcgaacccgccctgcccgtacagcgcagcgtgggagtcgccgatcatcgacatcaccgggatgccggcgggcaaaccacccgccgcgacggtttcagcaaagaaaccggcgctcggctggatcggggccaatgccgccagtggaatcttgaacagtgccaatagctccgggtcccaggcgcaggtgtgcaggttgaacagttgcgtgcgcgccgcgttggagtagtcggtggcaaacacctggccgccgctgagtttccacagcaaccagctgtccaccgtgcccaggcagatatcaccggcagcggcacgtgcgtgcccctcttcaaggtggtcgagaatccagcgcaacttgccggcggagaacatcgggtccaaggccagcccggttttttccaggatcagcgcctcatgtccctgctcatgcaattgggcacacaacgcggtggagcgccggcattgccaactgatgcacggcgacagcgcctcgccggtctgccggtcccaggccaccaccgattcacgctggttgctgatggccagcgctgtgatcgggcggtccacctgggccaggcattcctcaatggcggccagggtgctgtgccagatcagcagcgggtcctgctcggagaaccccggctgcggatgggtgatgctcagcggccgcgagcctcgggcaattacctgcccgcgcgcattgaccagcaccgccttggcgttgctggtgccttcatctatcgccaggatcagcggagtgttgtctgtcatcgcattcaccgcaaccgagtggcagccgccacaatcccagccgcgtcgatgttatgcaaggcgcgggtgggttcgcgggcgccggccgcggcatattcgccatcgccgatgcccaggcgcaccagggcaatgcccagcccggcttcggccagcacttcggcgaccaggctgccgatgccaccgttgatgttgtgctcctcgaccgtgatgaccgcccgcgtgccacgcagggcgctgagcaacacgtcacgctgcaatggccggatcgacgacaggttgatcacctgcgcctggatgccctgctccgccagcacccgtgccgcgtccaccgcttcatgcaccaccgagcccagggcgacgatgctcacgtctgcaccctgacgcaggatatccacctgccccggggcaaattgatagtcgcccgtgtgcacgtccggcaacgccttgccatccagacggatgtacaccgggccgtggtagcgcagcgcgtagtcgacgatctgccggcattcaagcgcgtcggccggggcaaagatctgcacgttgccaaaaccgcgcatcaccgaaatgtcgtcgaggctgtggtgggtgctggccaacgggccgtaactggcgccggcgttcaggccgaacatcttcacgttggcctggttgtagcaaacgtcgactttgatctgctcattggcccgcgaaatcagaaatggcgccgcgttgcaggtggcggcgatcttgccgcccagtgccaggcccgccgcgacgctgaccagcgactgctcggcaatgcccacgttgatcagccgctcgggaaagcgctgtacaaacggaccgatcttagccgtggaggtggagtcactgaccaccggcaccacgtccagtccggcatcgacggcggcaataaaggcctccaccatgacgctcgccaggtgttcactcgccatgattcaactcctccagtgccgcgttgatttcatcacccttgggcacgcggtggtgccattcgggacgggcttcgataaacgacacgcccttgcctttgatggtgtgggcgatcagcacctggggcgcaccggtcctggcctgcatgttttccagggcctcgatcaactggcccgcatcgttgccatcgcactcgctgacgcgaaaaccgaaggccgcccatttcacgtccagcgggtccagcggcatgatgtccgccgtcaagcccgccagttgcagcttgttcttgtcgacgatcacgaacaggttatccaggccgtatttcgccgccgccatcgccgcttcccagttggagccttccgccagttcaccgtcgccggtcagcacataaatgcgttttttgctgccggacatcttcgccgccagcgccagccccaccgccaccggcaggccgtggccgagggcgccggtgttcagttcgatgccaggggttttctgccgcaccgggtggcccggcaagtgggagttgaagtgctggtaggtgggcagccagtcgacggggatgtagcccgcctgcgccaggcagcaatacaaaccgccgacaccgtggcccttgctctggatatagatatcgcgctcagggtcgtcggtgcgttccgggccggtattgagaatgcggaaatacagggtcgcgagaatatcggtttccgagaggtcggccccggtgtggccgccggccggtgagtcggcattcaggcggatcacatggcgccggatcaggcgggcctgttctttgatctggtgggcgtcgtactggaaggcattcatgcagcggctcctttgaggctgaccacgcggggtgaaagtgtgcaaagctgtatttgaatatttattcagcagtgacaatatatttctatttagacgccgaacgctcgacaggtcaagtgaatgaccggggggaaaatgaaataaaacctggaaatgtccctcagacaaacggccaaaatcccacacgcgcttctctatcccgtggctttgcgccggatgaaagtcgcgatccagaggcctactggaaaaattaagcgcttgacattgccacggtggcactggaatctgaattaacagtcaagcacgcataaatattcacggcgcttgaaagcactccaaaaaaaataaatcaggagaacactgtggacgccaaagctactgtccagcatccggccgaactcaagccgccccaccgcccccggttggtgaaactgcttcccagcaatatcggcggcccgctgatcggcctgatgttgctggtgctggtcttctccttcagttccgaattcttcttctcgctgcgcaatggcctgaacattcttgaccaggtcacggtgctgggcatcctcgcaattggcatgaccgccgtgatcgtgatcggcggcatcgacctgtcagtggggtcggtgctggccttctcgatgatgatgctcggctggctgtaccaggaccaggcggtgccgctggggtttgcgatcccgatctcgattgccagcggcatgctcgccgggctggtgtccggcgccttgatcacctatgccaagctgccgccgttcattgccacgctgaccatgatgtcggtggcccgtggcctggcgaacatcctcaccgaaggccggcagatcgtcggttaccccgactggttcaccagcctggccacggtgcgtcacttcggtttcctctcggcaaccgtcgggctgttcctggtgatgctggtggtagcctgggtgttcctgcgctttcgtgccggtggccgtaacttgtacgccatgggcggcagcccggaagtggcgcgcctgtccgggatcaaggtgcgggcgatcaccctgtgggtgtatgccatcagcggtgcgctggccggtatcgccgccgtaaccctggccgcgcgcctggactcgtcccaacccagcgccggcctgagcctggaactggacgccatcgccgccgtggtgatcggcggcgccagcctcagcggcggcgtcggcagcatcggcggcaccctggtcggcgtgctgatcattggcgtgctgcgcaatggcctcaacctgctcggcgtttcgcccttcattcaacaagtggtgatcggcgtggtcatcgccctcgccgtgaccatcgacaccctgcgacgccgctccagtactgcccgttaaacctgttcgacagttgacaccctccaacaataaaaccaggagtcaccgacatgttcagccccaagaaactgctgttggccaccgccctcgcggccgccaccctcaccgctgccggcaccacgtgggccaaggacctgaccatcggcctggccgtggccaacctgcaggccgactttttcaaccagatcaagcaatcggtggaagccgagggcaaggccaagggcatcaaggtgattaccgtggatgcccagggcaactcctccacccaggtcagccagattgaagacctgatcactcgccagatcgatgtgctgatctacatcccggccggtgccaccgccgccggtgtgccggtcaaggcggcgaaagccgccggtatcccggtgatcgccgtcgaccgcaacgcccccgacgcgccaggcgatacctttatcgccagtgacagcgtggccggggccaagaccctggccgagtacgtcggcaagatcaccgatggcaaaggccgcatcgcgatcctgcaaggccagctcggcaccacccccgagaacgatcgcgccaagggcttcgaagaaggtttgaaagctttcccggacctcaaggtcgtcgcccagcaacccgccgaatgggctcaggacaaaggcttcgccgtggcccaggacctgctccagcgtgacccgaacatcacggtgttcttcggccgtgccgatgccatggcgttgggcgccgcccaggcggtgaaggtcggtaacctcgaccacaaggtggtggtggtcggttttgacggtgacgtcgccgggctcaaggccgtggaaagtggcgtgctgaacgcgaccatgacccaacagacccagaagatgggccgcctggccgtggcgtcggccatcgacctgaaagccggcaaggctgtgcccaaggagcaactgttgcctaccgtgctgaccaccaaagaaaacgtcgcgccgttcctgcaacagcacccgtaagccttggaggtcgtcatgcaagcagcagccctggacaccgctcgcgccgacgcggtgctgtgcctgcgcaatatcagcaaggcctatgggccggtgcaggtactgtcgcaggtcaatgtggacatccgccccggcgaagtgctggccctgctcggtgagaacggtgcgggcaagtcgaccttgtcgtcgatcatcgccgggctggtacagcctgaagccgggggcagcatgacctggctcggcgcaccttacgcaccggcgtcgcccggtgcggcactgagcgccgggatcggtctgatccaccaggaaatccgcctgctgccgcaattgtcgatcgccgagaatatcttcgtcggccgcctgcccatgcgtcatggacgggtggaccgcgcgtacatggaggcccaggcgcagatccagttggagcgcctggggctcaaggtgccggcatcgcgcaaggtcgaaggcctgagcgtggcggcccagcaattggtggaaatcgccaaggcgctgaccctcaaggccagcctgttgattctggatgaacccactgcggcattgggcggcgaagaaaccgagttgttgttcaaacaggtggaacggctcaaggccgagggcgtgtcgtttatctatatcagccaccgcctggaagaaatcgcacgcatcgccgaccgcgtgctggtgctgcgcgacggtcgccagattgccttgcacgccaccgcccaggtgccggtgcgcgagctggtggaacagatggtcgggcgtagcctggagcggattttcccggccctgcaagcaccacaggatcgcgtgatgttgcaggtcaaggacctcagctgtcgcgagtttgccttgcacggcatcgacttcagcgtgcgcgctggcgaagtgttcggtattgccggcgtggtcggcgctgggcggaccgagctggtgcgcacccttgccggcgcggcacaggatatccagggccacctggtgctcgacggtgaagtgcgccacctgcgctcgcccttcgaggcaatccaggccggtgtagtgctggtgcccgaggaccgcaagcagcaaggcgtggtggtggagcaccgcatcgaagacaacctgatctacggcaacaccgacctgttggacaagcgcggctgggtgttccctgccccgctgcgcgaattcgcccgcacggcggtggcgcggttgggggtgaagggtgcgccgcagtcgcgaatttcgagtttgtctggtggtaaccagcagaaggtgatcattgccaagtggctggcgcgcaatcccaaggtgttcatccttgacgagccgacacgcggcatcgacgtgggcgcacgggcggcgatctatgaagtgatcgcggacctggcggccaagggcatggcggtgattgtggtgagctcggacctcgatgaggtgctggggttgtcccatcgggtgatggtgatgagccggggccggcagatggggatcctggagcgtggcgcggccacccccgtttcggtgatggaaatggcgactgcttaaccagagaacaccgctgttttttgtgggagggggcttgcccccgatagcggtgtatcagtcacacacttttcaactgaaccactgccatcgggggcaagccccctcccacaggggtcagctgtgatttcaaataacggagttatccatgcagctttttagtcttgaaggccaagtggcctttgtcaccggcgcaggcagcggcattggccaggcgattgccgtggggctggccgaggcaggtgcggatgtggcctgcttcgatctaccgggcagccccggcatcgccagcaccgtcgaacgcatccaggccttaggccgtcgcgccctggccttgagcggtacggtcaccgagcgcgccgcactggatgcagcggtcgcgcgcaccgaagccgagctgggcgaactgagcgtcgcggtcaattgcgccggcatcgccaatgcccaggccgccgaagacctcgaactgcaacgctggcaaaccaccctggacatcaacctcaccggcattttcctcagttgccaggcccaggccgccgtgatgttgcctcggggaaaaggagccatcgtcaatattgcctcgatgtccggcagcatcgtcaaccgtggcttgctgcaagcgcactacaacacctccaaggccggcgtgattcacctgagcaagagcctggcgatggaatgggccgacaaaggcttgcgggtcaattgcatcagccccggctacaccgccacgccgatgaactcgcgcccggaagttgccgaccaggtgaagatctttgaacagaccacgccgatgggccgcatggccagcgtggaagaaatggtcggcccggcgattttcctggtcagccaggcctcgtctttctgcaccggtgtcgacctgttggtcgatggcggctttgtgtgctggtaggagttcgtcatgtcccaacgattcagcggtaaaactgtggtcatcaccggcgcctgccggggcatcggcgccggcattgccgagcgcttcgcccaggaaggcgccaacctggtactggcttccaacgacttggaacgcgtgaccttcaccgccgaccaactggcccgggaataccaggtcgacaccctggccctggccatcgacgtcacccgcgaagacgatatcgaaacgctctaccgcgaaggccacgcgcggtttggcagcatcgacgtgtcggtgcagaacgccggcatcatcaccatcgaccattacgacaaaatgccccgcgccgatttcgacaaggtgctgcaggtcaacaccaccggcgtctggctcggctgccgggaggcggccaagtacatggtcaagcaaggcagcggccggctgatcaacacctcctccggccagggccgccaggggttcatctacacgccccactacgccgccagcaaaatgggcgtgatcggcatcacccagagcctggcgctggagctggcgcggcataacatcacggtcaacgcgttttgccccggcatcatcgaaagcgagatgtgggactacaacgaccgcgtgtggggcgagatcctcagcaccgacgagaaacgctacggcaagggtgaattgatggccgaatgggtcaggaacatccccctgcgccgcgccggcaaaccctcggatgtcgcgggcctggtggcgtttctggcctcggacgatgcggcctacctgaccggccaggcgatcaatatcgacggcggcctgatcatgtcgtaagggtttggtatcctcacggccattgagtcatgccttttactataaagagccctgaggccttcatgagccagatcgaagaacagcgcctgatcaccaagatcgcgagcctctattacgaagaagggctcaagcagtccgagatttccgcgcaactggacctgtcccaatcctttatcagccgcgccctgcgtcgggcgctgcaggaaggcgtggtgaagatcacggtgatgcgcctgcaaggcctgcacctggagctggaaacccagttgcaacgccgctacggcgtgcgccgggtgatcgtggtggaagccaccgagccgggcaatgacgagagcatcaagcaggccatcggttcggccgccgcccactacctggaaaccagcctgtcgccccaggaccatatcggtatttcgtcgtggagcagcaccattcgcgccatggtgagccacctgcacgcgcaaccgggcaaacaggcagcccaggaagtggtgcaactgttgggcggcgtcggccacaagggcgcgtttgaagccacgttgctgacccagcgcctggcgaccctgctcaactgcccggcgtttctgctgccctcgcaaagcatcgagcaatcggtggagagcaagcagcgcatcgtgcagatggaagaggtcaaggaagtgctgcagcgctttgacagcatcaccctggcgattgtcggcatcggcgacctggagccctcgcaactgctgcgcaacagcggcaactactacaccgaagacatgctgcgcctgctcgccgaacgcggcgcggtgggcgatatctgcctgcgctacttcgatgcccagggccagccggtgctggaggaagatgaagaattcgtggtgtcggtggcgctgcccaagctgcgtgccatccaccgagtgctcggcctggccggtgggttgaacaaggtccaggccattcgtggcgcactccagggcggctacctggacatcctgatcaccgacctggacaccgcacaggccctcaaccaataaccctttttggagactgccgctcatgacgtccaagctcgaacaactcaagcaattcaccaccgtggtgtgcgacaccggcgacctggaagccatcagccgcctgcgcccggtggatgccaccactaacccgtccctgctgctcaaggcggccgccatcccggaatatgccgagttgctgcgcagcgcggtgggccagtccaagggcgatgtggacctggcctgtgaccgctttgcggtggcggtgggctgcggcattctcaaggtgattccggggcgcatctccaccgaagtcgacgcgcgcctgtccttcgacgcagacgcattatgggccaaggctaaccagttgatcgcgctgtacgaccaggccggcgtcggccgcgaccgcgtgctgatcaagctggcctctacctgggaaggcattcgcaccgccgagcgcctggaaaaggccgggatccagaccaacctgaccctgctgttttcgttcgtccaggccgccgcctgcgccgatgcaggggtgttcctgatttcgccgttcgtaggccgcatctatgactggtaccgcaagaacaccggcctggactacaccggcgccgaagacccaggcgtgcagtccgtgacgcggatctacaactactacaaggccaacgccatcaacaccgtggtcatgggcgccagcttccgcaccctcagccagatcgaacaactggccggctgcgatcgcctgaccatcagccccgagctgctgcaaaagctcgatgaagaccagggcctgctggaacgtcgattgaatccgggggcggttggcgagccgcgccagaccctcaacgaggcgcaattccgctggggctccaatgaggacgcgatggccaccgagaaactggccgaaggcattcgtcagttcgcccgcgaccaggaaaaactcgaggcggtcctcgcagccctatgagccctgccctgtcgctgagccagcctcgcaccctggtgttcctggcctacccccagatgggcctgctcgacctgaccggcgcccagaccgtgttctgggccgccaccaaggccatggccgagcgtggcttgccgggctacgtgatgcacaccgccagcctggccggcggcctgatgcagaccgccgaggggctgagcgtggacacgctggcgctggagcacctggacacgcacgtcatcgacaccctgatcgtgcccggcgcgccggcgatccaacaggcgatggccgccaataccgagctggtgcaatggctgcgcgtggcctccgccagcgccgggcgcaccgcctcggtgtgcagcggcaccttcctgctggccatggccggcttgctcgacggccgccgcgccgccacccactgggccatgtgcgacatgctcaagcagggtttcccggacattatcgtggacatggacgcgatctttatccaacagggcaatgtgtggacgtcggcgggtgtgaccgccggtatcgacctcgcgctggcgttggtagaggccgattgcggacggcccgtcgccctgcaagtggcgcgggaactggtggtgtttctcaagcgccccggaggccaggcgcaattcagccaactgctgcaagcgcaaaccgacgacaccgccggtttcgatgccttgcacctgtgggtcgccgacaacctcagcgacagcgacctcaccgtggagcgcctggctgaacaaagccgcatgagcccgcgcaactttgcccgggtctacaagcagaaaaccgggcgcacgccggccaaggccatcgagctgtttcgcctggaagcggcgcggcgcctgctggaagactcccagcgcaacatcgaccaggtcgcgcaactgtgcggcttcggcgacgaagaacgcatgcgctataccttccagcgtcacctttcgatctctccccgcaactatcgcgagcgcttttcacgctgagcgcctgcggcctggcagtaattcagggttatgtgtcctaccagacaagcagcgctgcttttacagtgagccggcaacgcctcaccgcttgagcaaacgaattgacctggtccctggaacatcccatgaaacagcacatccttattatcggcgccgggttcggtggcgtctggagcgcgttgagcgctgcgcgcctgctggacaaacatgatcgccacgacgtgcagatcagcctcctcgccccacagccggaactgcgcatccgcccacgtttctacgagcccgctgtacacaccatgcaggcgccactgggtccgttgttcgaagccgtgaacgtcaagttcattcaaggcgcggctgacagcatcgatgaaaacgccaaacacgtgacctaccgggatacggccggcatctccaccacgatcccgtacgaccgcctggtgctcgccgccggcagccgtctgaaccgtccgcagatgccaggcatcgagcatgtcttcgatgtggaccagatcgaggatgccacgcgcctggaagctcatatcaccgcgttgaaaaacctgcctgatagtcccgcgcgcaacacggtgctggtcgctggcggtggtttcaccggcatcgagacctccaccgaaatgccggcgcgtctgagggcagccttgggtgacgatgccgatatccgcgtcatcgtcgtcgaccgtggcccgcagattgccgcctccatgggcgatggcatccgcccatcgatcatcgaagccagcaacgcactgggcctggaatggatattgaacacgtcggtggcttcagtggatgccagcggcgtgaccctggcggatggacaacgcattgaatcgaaaaccgtgatctggaccatcggcttccgggccaacccgctcaccgagcaggtcagcggtgcccgcgatccccagggccgcctgcatgtagacggcaccctcaaggtcaagggccaggccgacgtgttcgccgccggtgacgtggcttacgccgccaccgacgacctgggcaactttgccggcatgtcctgccagcacgccatcgccctgggccgctatgccggcaataacgtcgccgccgacctgatcggcgtggcgccgatgacctaccgacaacccaaatacgtgacctgcctcgacctcggcgcctggggtgccgtgtacaccgaaggttgggatcgccaactgaagctggttggtcaggaagccaaggacctcaagcatcagatcaataccgtgtggatctacccaccggccgccgagcgtgctggcgcgctggcggcggccgacccgttgattccggtggcctgaagcccgtactcccgggcgcccgccgctgttgttcaggcgggcatttttttgcggcattcatccattgatcgagccgccaccgcgcccatcaccccgcccaccatcggcgccagccagaacagccaaagctgtgccaggtaatccaccccggcaaacaacgccggcccggtgctgcgcgccgggttgaccgaggtattggtcacagggatcaggaccaggtgaatcaaggtcagtgccaagccaatggcaatcggggcaaagccaggcaccgcgccgggtgcggtgacgcgcataatgatgaagacgaagaaaaacgtggcgatcagttcagccagcaacgcggacttcatgtcgaaatgaccggggctgagcggaccatagccgttggcggcaaaaccgcccaccgcgaaatccggctgcccgttggcaatcaggaacaatgtggcagcggccgtaatcgcccccgcgacctgcgccacgatgtacggcagcacatcagcgccctcgatacggcgccccacccacaggccgagggtcaccgccgggttgaaatgcccgccggaaataccgcccagcgcataggccatggtcaacaccgtaagcccaaacgccagggaaacgcccacaaaaccaatgcccaacccggggaaagcagccgccaggatggcgctgccacagccgccgaaggtcagccagaaagtaccgatgaactctgcagtcaaacgtctttgcacaatcaactccattgcagctcaagtgccgtcgccacgggaggtgggcggtccggggcgacggtagcaatgggtatcaatatgtcctgtaagacttgtctggttttaacggcttacaacgccctgcccaaatttcctgatcgccaggcagtaaccgatcaacgctaccgccgccagcaacccaccggccgcgccgatccaggcgaagccgaactggctgccgacccaactgcccatcagcgcaccgccgccaatgccgatgttgtagatgccggagaacatcgccatggccacgtcggtggcgtcgggtgccagcaccaacaccttggattgcatggccaggccaaagcccatgatcgccatgccccagaaaacgctcagcaccaccaggtaggactcggcaccgctcaagggcagcagcaacgtcaggcagacggccaggataaacaccgcgcccaccacgaacaggtgcgggttgaaacggtgcaccaggctgaacagcagcgagccgatgatgcccgcgccgccgaacaccagcaggatcagggtcaccgcgctgccgctcatgccggccacgcgttcgacgaacggttcgatgtagctgtaggcggtgaattgcgcagtgacggtcatggcggtcagcacatacagcgccaccagcgccgggcgcttgaacagcagcggcaggctgcgcaacgagccggagttctggctcggcaacagcggcaaggtgcgcgccagccagaacaccagcgcagcggcgaacgcgccgatcaccaggaacgtggtgcgccaacccatggcctcgcccagcaagcggcccaacggaatacccagcaccatcgccagggaagtgccagtagccagcaggccgagggcttgcacctgcttgccttccggcgccaggcgtaccgcgagtgaggcggtgatcgaccagaacagcgcatgggacagggcgatgccgatacgactgagcatcaggatgccgaaactggtggcgacactggaaaggatatgactggcgataaacaggccgaacagcacgatcagcagcttgcgccgctccacgttgcgggtcagcagcatcaccggcaatgaagtcagggacacgatccaggcatagatagtgagcatcagcccgacgctggacaccggcatgtcgaaactggcgccgatggcactgagcagcccgacgggcacgaattcggtggtattgaacacaaacgcggccaacgcgagagcgaagaccggttgccaattggcttggggcgttgcggctgaaatgctcatggaacggcgcggtactctggcagtgatcaagcgggggcggtgatcgagcggccacccaggacaagcgccgccgccgagcattctataggtttccggcccgactgttggcgctcatcccgctcaaaatgacctcaaccgggtcagggtgccgtcatggtgaccacgtaggcgcccgattgaaccggcttgccgagggcatccaccagcacataccgctggtcgaaatagcgcccgttggggctgtcggccaccaacttgacgttgaccgccgaattgcccagcgcggtcacactgcgcaccgactgtgcctcgaactggctgccacgcagggcttgcgggcatccattgaactccactgtcgccccgcccgacgtactggggttacaaccgggctcgacgatgctgccgtgaaattgaatgacaccggaagatgccgccaggcatgcccccgtccataccgcaagaacaccggtaaccagtgacaaacgtaaaacgttcatgtcgacgctccttcttgggctgttaagaagtaagtcgtctggcccggcgtttacttgaggttattcgtcggtgtctgaaagaaaagttacgggtccacctgccccatcaattccggaatcgactccggccgattcgcataacgctgggccaacgccgcgcagaccatcaactggatctggtggaacagcatcagcggcaggatcagcacgcccatgctcgccccggcgaacagcacctgggccatcggcacaccggtggccaggctctttttcgaaccgcagaacaggatagtgatgcggtcttcctggttgaaaccgaacgccttgccgagcaccgtggacgccaccaacaccaggcccagcaacacgcagcacgccactaccaggccacccagttcccatagcgggatctggtgccagataccttcattcaccgcttcgctgaatgcgccatagaccaccagcaggatcgagccctgatcgacgaatttcagccaggacttgttgcgcccgacccactcaccaatccagcggcgggcgatctgcccggcgataaacggcagcagcaattgcacgctgattttcaggatggcgtcgaccgtcgagccgccgtcgccgtgcacattgagcagcagcgtcaccagcaacggtgtcaggaagatgccgaacaggctggacgccgccgcgctgcagatcgccgccgggatattgccccgcgccagggacgtgaacgcaatcgccgattgcaccgtggccggcaaggcgcacaggtagagcatgcccatgtacaggtctttgccgatcagcggcgacagcaccggcttgagcgccaggcccagcagcgggaacagcacgaaggtcaggctgaacaccagcagatgcaggcgccagtgcccggcgccggccacgatggcctggcgcgacagcttggcgccgtgcaggaaaaacagcagcgcgatggccaggttggtcacccagccgaaggccacggcggtctggccgctggcgggcagcagggaagcgagaatcaccgtggcgatcagggtcagggtgaagttatcgggcaggaaacgggggcgagtcataagcaggatcttccgggggttgccaagagcgtcatcgcgactctaacgtaacggcttgttaccgactaacgccaacgagccaacaaatgccgcctaaaggacatgccaacaccgtgcgccgtagcgtgccagggctttccagcctgccacggccggtgtatgggcgcaccgaatcgctgcccaaccgtgcgctgacccgccggcacagccacccatgggtgcaattgtcctacgcaatttccggggtgctggagatccagaccagcgttggccgtttcgtcgcgcccccccagcgcgcggtgtggattccagccggtgtaccgcatcgggtgttcagttcgccccacacagagatgcgcagcctgtacctggattgcagcgtcaccacctgggcggccgagcgctgtcatgtgctggcggtgagcagcctgctgcgcgagttgatccgcagtttcagcgaactgccggtagaatatgccgaggatgggccggacgggcgcctggcccaggtggtgctggaccagctggcggcggcgccgcacgtcgacctgatgctgccactgccgctggacacacgcctgcggccgatctatcgcagcctgagtgcgcacccggaacagcaaacgaccttgggccagtggagccagaaactgggggtgagcgagaagaccctcagtcggttgttcttgagcgacaccgggctgacgttccgcgcctggcgccagcgcctgcgcttattgagcgccctgcccgccctggagcaaggcgagcgggtcacggatgtggcgctggggtgtggctatgagtcgacgtcggcgtttatcaatgcgtttcggcagcaattcgaggccacgcccggcgaatttttccgctgacatcagctgccattgccgccatgggcctcttcgaagaagtagtccttccaactggcggccttgtttttcagcacgcccaatgcctgcaatttctcggcgtagatgtaggtacgctgcggcacgatggtgaagtcgatttccgggtcctggacgattttttccaccaggtccaacggcaacttcgactgttctacgcggatataggccttggctgccgctggtttatcggccttgatgatcgtctcggcttcggccagcgcggcatagaacgctttgtaggtcttggggttttcgtcgtggaatttctgcgtggtgtagagcacgttgaacgtggccggcccaccgaggatgtcgtaggaactgagcaccttgtgcacattcggattcaacagttcctggtactggaacggcgggctggagaagtgcgcgttgatctccgatcccccggcaatcagcgcggcggtcgcatcgggatgggccaggctgatggagatgtcgtcgaacttcttgaagctggcgtcgccgaactgcttggcggtctcgatctgcaaggtgcgtgactggaaacccacgccggcggcgggcacggcgatgcgatctttttcgctgaagtccttgagggtcttcacgttggggttgttggtcagcaggtagttgggcatcgagcccagggaggcgatggccttgacgttctgcttgcccttggtgcggtcccacagggtcagcattggcggtacaccggcagagactacgtcgagcgcaccggccagcagcgattcgttcatggcggtggcgccggaaatgctgttccactccacctggatatccaggccttgttccttgccgtgtttttcgatcagatgctggtcacgcaccacgtcgaggatcaggtagccgatgccgaattgctgggcgatgctgatcttgccttcggcctgggcgccgatactgatcagggccgtcgcagccgccaacagggtcagggaggaacgcttgaaagtcatgggagtctgccgcgtttttaagaaggtgatggagcctagcgacgtttttttagactggaaaagaatatctggatctattgttatgcaaatggcccacaaaccagcgcccggctgctattgtgccgcgctttgaaaaactgccgaaccagcgaggaaatggacgttgaacactgacgaaaaaatgaccggggacctgttcgaggtggataagcgcctgtcactcaaacccgtggtggacttcaacgcctacctgcgcagcgcgttcggcgacggcccgtgcagctgcatccgctgcaccagcggtaacggtgatgaaagcggctatgagttccagcacagcttcaccttcgacggcaaacccacccagcgccgcttcgccaccacggcgggcagcgatgtgttgcaagtgttgaagaaggcctggttgtcgtacaccaaggccgagctgccgttgagcggtgtgctggcgctggatacggtgaaggagtttgtcgagccgcagttgcacaagcggttgataccgctgtttttggccagtgggttggtcaaggacgtagacggagcgttgcaggttcagccgcaggcagcgtaagccacattttgtggagcaggcagatggttgtggcgagcgggcttgccccgcgctgggcaagcccgctcaccacaattacactgaagtgatcacttacgcgccgcctcccactgcttcagcaggtcaccgtaagccacggtctcacccttcggcttctcgttggccagtttcggtttcggcgcgcccggctggtcgaaccagtattgcgcgtcacgctcggggttcattttcgggccgcacaccggttgcaccttggagcgttccaggcgcgtcatgatcgcgtcctgctccttggccaggttgtccagcgcttgctgcggggtttgctcgccgctggcagccctggcgatgttgctccaccacaactgcgccaggcgtggatagtccggcacgttggtgccggtcggggtccactcgacacgggccgggctgcgatagaactccaccaggccaccgagtttcggcgccatgtcggtcatagcctgggagttgatgtcggactcacggatcggtgtcaggccaacgatggttttcttcagcgagacggttttcgaggtcacgaactgcgcgtagagccaggccgcaagtttctgtttctcaggtgtcgacttgaggaaggtccaggagcctacgtcctgatagcccttcttcatgcccttttcccagtaaggtcccacaggcgacggcgccatgcgccatttcggcgtgccgtcggcattcaccaccggcaggcccggcttggtcatgtcggcggtaaacgcggtgtaccagaagatctgctgggcgatgttgccctgggacggcaccgggccggattcggagaaggtcatgcccgcggcttccggtggcgcgtaggctttcatccaatccacgtatttctgtgtggcaaacactgcggccgggccgttggtgtcgccgccacgggtgacgctggagcccaccgggtggcagtcctccacacgaatgccccactcgtccaccggcaagccgttgggcaagcccttgtcgccgccaccggccatggagaaccaggcatcggtgaagcgccagcccagggacgggtctttcttgccgtagtccatgtgcccgtagacacgtttgccgtcgatttccttgacgtcttcgctgaagaacttggcaatgtcttcataggccgaccagttcaccggcacgccgaggtcatagccgtatttttccttgaacttggctttcagctccggacgctcgaaccagtcggcgcgaaaccaatagaggttggcgaactgctggtcgggcaactggtagatcttgccgtccggcgcggtggtgaaggagataccgataaagtccttgatatccagggtcggcgaggtgaagtccttgccttcgttggccatcaggtcggtgatggattcagtcttgccgtagcgaaagtgcgtaccgatcaggtccgagtcgttgacccagccgtcgtagatgtttttgtcggactgcatctgggtttgcagcttctccaccacgtcgccttcctgcaacaggtcgtgggtcagcttgatcccggtgatttccgtgaaggccttggccagcaccttggactcgtactcgtgggtggtgagggtttccgacaccacgttgatcttcatcccacggaacggttcggcggccttgataaaccacttcaattcctccagttgctgatcggccgtgagggtggacggtttgaactcgctgccgatccattttttcgcagcatcttcgtacgcatcggcccaggccgaagcgctcaaaccgctcatagccagtacggcggccaatgaaatgctatgtcgcagcttattgttcttattcaacatagagacctcctggttgtttattcataagggcactagccccaacgcatcacactcaacagccataccagggagagcgcggacgctacccagatgctccagtcggtaacgccgatcaccagcaaatgcaggtaggcgctgccgagaagaccgataaacaaacgatcaccacgggtggtgctgatcggcaaaaagccccgccgggggatgctcggcgagcgcagttcccaagtggtcatgcccgcaaggatcagggctatgccgccaaagaacagcgcggtgggggtggtccaggccatccattccatcatcgactcctcagacccggcccagggcaaagcccttggccacgtggttgcgaacaaaccagatcaccagcatgccgggaaggatagtcaacacccccgccgccgccagcacgccccaatcgatacccgacgccgacaccgtgcgcgtcatgactgccgcaatcggcttggcgttgaccgaggtcagggtgcgcgccagcagcagttcgacccaggaaaacatgaagcagaaaaacgccgtcacgccgatgccggagccaatcaacgggataaaaatcttcacgaaaaacttcggaaacgagtagccgtcgatgtaggcggtttcgtcgatttccttgggcacgccggacatgaacccctccaggatccacaccgccaacggcacgttgaacaggcagtgggccagggctactgcgatgtgcgtgtcgaacagccctatcgacgagtacagctggaagaacggcagcaaaaacaccgccggtggcgccatgcggttggtcagcagccagaagaacaggtgcttgtcgcccaggaaccgataacgcgaaaacgcataggccgccggcagcgccacactcagggaaatcaccgtgttcaggctcacgtagtacagcgagttgaggtaaccggtgtaccagctcgggtcagtgaagatcaccttgtagttggccagggtgaagtcctgcggaaacagcgtcagcccgccgaggatttcggtgttgctcttgaaggacatgttcagcagccagtagatcggcaccagcaggaacaggatgtagaccagcagcgggatcactttcttcataaacgtaagacgtttgctcatgttggcggcctcagcggttggcgtcggagtgggtcatggcggtgtagaacagccaggacaccaacaggatgatcaggaagtacaccagggaaaacgctgcggccgggcccaggtcgaattggcctacggccatctgggtcagcgtctgactcaagaaggtagtggcgttacccggtccaccgcccgtaagcacgaacggctcggtgtagatcatgaaactgtccatgaaccgcaacatcaccgcgatcagcagcacgcttttcatcttcggcaactggatatgtcggaacaccgcccagggcgatgcacgatcgatccgcgcggcctggtagtacacgtccggaatcgcccgcaaccccgaatagcagagcagcgccaccagtgaggtccagtgccagacgtccatgaccaacaccgtgacccaggcgtccatggtgttggcggcgtagttgtaactgatgcccagggcgttgaggctgtaacccagcaggccgatatcggcgcgaccgaagatctgccagatggtgcccactacgttccacgggatcagcagcggaatggccaggatgatcagcaccagcgacgaccagcggcccttggtcggcatggtcagggcgatggcgatgcccagcgggatttcgatcagcagcacacaggccgagtagatgaactgacgcagcagcgagtcatgcaggcgcgggtcgagcagcacctgcttgtaccagtcggcaccgacgaagtagcggctggactggtcgaagatgtcctgcaccgagtaattgaccacggtcatcatcgggatcaccgcactgaacgccaccagcaggaacaccggcaacaccagccaccaggccttgttgttctgcaccttgttcatggctgcacctccagcaggtagtcgtcggcatacaccatcagccattgcgccggaaagctgatggacgccttgccctcaggcaccggcttgtcttcggccaggcgcacttttagcagcgcgccatcgaggttgagagtgatgatcttgtaggtgccgaggtcttcgaggtgagtgacatcggcctgcagggcgtcagggttgtactcgtcccagacatggatgaattccgggcggataccgacctgcaatttcttgtagtcggtcgtggcaatgcgttgctgcacggcctcggacaagggcagatgggtgccagcaaagcgcaccccgcccgcctcagcctgcacctcgatcagattcatcccagggctgccgatgaaatagccgacaaaggtatggctgggccgttcgaacaggtcacgcggcgtaccgaactgcacgatctggccgccgtacatcactgcgatcttgtcggcaaaggtcgaggcctccagttgatcgtgggtcacatagaccatggtgatgttgaattgctcatggatctgcttgagcttgcgccgcagtttccacttgaggtgcgggtcaatcaccgtcagcggttcatcgaacaggatcgccgacacgtcgtcgcgcaccaggccccggcccatggagactttctgtttttcgtcggcggtgaggttgcgcgcctttttggtcagcaggttttgcaggtcgaggacttcggcaatttcctgcaccttgctgtgaattttcgcctcggccatgccctggttacgcagtgggaatgccaggttatcgaacaccgtcatggtgtcgtacaccaccgggaactgaaacacctgggcgatattgcgtttttccggggtgaggtcgttgaccacttgggtgtcgaacagcacctggccttcggaggggctgagcaggccggagatgatattgagcaaggtcgacttgccgcagcccgacggcccgagcaaggcgtaggccccgccctgctcccacacgtgattcattgcccggatggcgtagtcctcaggccctttcggcgcagggctgtagctgtgcgccaggttctgcaaatggatctcggccatcaggcaaccctcgcgacacggcgcccgggggcctggaccaaccggccctggccatcgaacacaaacagtttatgggtggggatatacacgcggatcggcgcgtcgacgtcgtattcgtgcacccccggcaggtgcagcaccagcaggaagtgctcgctgcgcacatgcaggaaggtttccgaaccgctgatctccgcgacttccacggtgaccgccagttccaggtcgtcatcgttgctcggcaccaggctgatatggctggggcgtacgccgaaccggaactcgccttcgccgatgggacgcaggtcgacgttcagcgggaagtgcacgaaattggcgaagctcacctcgttgccactgatacgccccggcatcaggttgatcggcggctcggaaaacagctcagcggccaagacggtctgcggctggtgatacacctcggccgccttgccgctctggatcacccggccttcgtgcaggatggtggtggtgccgccgagggccagggcttcgttgggctcggtggtggcgtagatggcgatggtgtggcgcgctgcgaacagttcgcgcatttcctgacgcagctcttcgcgcagtttgtagtccaggtttaccagcggctcatcaaacagaatcagctcggcatccttgaccagcgcgcgcgccatggccgtgcgctgctgctggccaccggagagttccagcgggtgacgctggaggaatttctcaatgcgcagcatttttgcggtttccagcactttgctctggatcagttcgttggacacaccggcctcgcgcaagggcgaggcgatgttttcgaacacggtcatggtcgggtagttgatgaactgctgatacaccatcgacacgttgcgcaggcgcaccggtttttgcgtgacgtccacgccgttcatcaggatgcggccgctgtcgggcttgtccaggccggccatcaggcgcatcaggctggtcttgccggacagcgtacgaccgagcaagacgttgaaggaaccggcttcgaaacgcaggttggcgtcgtcaatccaggtctggccttcgacaacgcgggagacatgttccagggtcaatgacatgacacgacctttttattattggaatgaatctggccagatgacagagcgagtttcatgccaaaacggcaagttattgatgtgcaaggaaatggcgtaaatgggatgttcgggagtgaacaatctgactgaacaactgaacaatccgggggttgacaatgaacagttctgaacaacactctcatgaccaacacagggcaaatgtgggagggggcttgcccccgatagcggtcagtcagatacagattcatcgactgaaccaccgctatcgggggcaggccccctcccacattgacccggttccaatcgttaaatagtgcaagaccccataacaataaaaacgaaggtcaccccatggccgaaccactggctcacgacacccttatccaggaatcctggcgccgttgccgcgcctttggcctggaccaccagagcacgcccagcttcgatcaactgcctgccgagggcatcagccaattgctggagagccagcattcgctggtgcagaccacccaccaggaagtgctgccctactacgagaacatcctgagcaattccaactgcctgatcatgctggccgacaaccaaggccaggtgctgaccagttggggcacccagcgctttatcgagccgaagctggcccgtggtttcaacccgggagccagctggatggagcgcgccagcggcaccaatgccatcggcactgcgttggcctgcgcccaggcggtgcatatcgaacacgatgaacacttcctgaaggccaaccgtttcatgacgggctcggcggcaccgatcttcgatgcccagcgcgagatcatcgcggtgctggatgtgtccagcgacagttacctgccgccctcccacaccctgggcatggtcaagatgatgagccagaccgtggagaaccggctgatcctcaacctgtttcgcggcgaacacttccaactgaccttcaataccgggctgagcaacctcgacagccagtgggccggcctgttgatctttgatgagagcggccaggtgctctcggccaatcggcgtgccgacaacctgctgggcatcagcctgtcgcgggtgatgatcgacagcctgttcaaggtgtcgttgctggaactgttgaaccagccggaaggcctgcccttctccctgcaagcggcgggacgcaaccgcttccaatgcttgttgaagcggcccaagcagacgccggtgcaagcgcgcgtgttcaccgcgccggcgccatcgaagcctgcgccgattggcctcaagaccttgcacttcggcgacgcgcgcgtggagaaagccgtgcgccaggccgagcgcctgctggagaaggacatcccgctgctgatccatggtgaaaccggcgtgggcaaggaggtgttcgtcaaagccctgcaccaagccagctcgcgcagccataaggcgtttatcgcggtgaactgcgcggcgattcccgccgagctggtggaatctgagctgttcggctacgaaaaaggtgcattcaccggcgccaaccagaagggcagcatcggcctgatccgcaaggccgacaagggcacgctgtttctcgacgagatcggtgatatgccgctgcccacccaggcccgcttgctgcgggtgttgcaggagcgttgcgtgcaaccggtgggcagcagcgaattgttcccggtggatctgcgcatcatctcggccaccaaccgtgcactgcgggagttggtgcaggccgggcgtttccgtgaggatctgtactaccgcatcggcggcctgaccctggagctgccgccgttacgcgagcgcaccgataaacaggcgctgttccagcaactgtggcagcagcaccgcgagccgactcaatgggcgggcctgagcgccgaagtgctggcgctgttcgagcagcacccgtggccggggaatttgcgccaggtgagcagtgtgttgcaggtggcgctggccatggccgaggaacagccgatccgtgccgagcatctgccggatgatttcttcgtggatctgaaagttaccgcgccactgcccaccagtgagtacctggatgacagcatcgacctgaaccagcgcttgaaggccgccggcggcaacatctcccacctggcgcgggagctgggggtgagccgcaatactctctacaaacgcctgcgccagaacgaaaactagcgcggcttgaccaccaccagcagatcggtgaagtactccacctgaatcggcaggttatcggccagcgacgacaacgccgccgccgtgtcgtccagcttgaacaccccggatacccgcaggttttgcagggcctgggggtcgaagcgcagcatgccgtggcgatagctggcgagggtttgcaggacttcgctcaggggttggtcgttgaccttgagcaggccccgggtccaggcgtcggggtcgctgtcgccaatggcttgcggcggctgggcacgaccgtggtcgagcaccgagcgctggccggctgtgaccttgactccttcgttgctttcacctttgaccgctaccgtggattcgatcaccgtgaccagcgtggtgccgtctgccgcgcgcttgaccagataacgcgtgcccagcgcagtggccgtgccctggtcggtacggaccacaaaggggcgttgcgcatccttcgccacctcgacccagagctcgccttgcagcagttcgatcacccgttgatggccgtcgaacttcacatccactgccgagttgctgttgagctgcaactggctaccgtcttcgagggcgatctgtcgccgctcaccgacaccggtacgctggtcggccatccacaccggcaggtgttgcaggcccagccagccgcaccaaaccaggccgagcacgcccatcacctgcgcgccacgcgggcgtcgcggggtgaaggcgcggttcagggccatgcgcgcgggcttggcgggcaaggcatcgaggctgccccataacgcactcatgcgctcgatggccacggcgtggcgcgggtcggcctggcgccaggcgttgaacgcctggcggtcggcgtcggtcacgccttcgtcgtgcaggcgagtcagccactgcgctgcttgctggatgatctgctcggaactcatgccagcgggtctgccgggtgcaggctgtggtagcaatgcaccagggcgctggaaatgtagtttttgacggtgctggaggaaacgtccaggcgcagggcgatttcgctgtaggtcagcccgtcgaggcggctcaacagaaacgcttcgcgggccttggcaggcaggccggcgagcatctcggcgatgcgttccagggcttgcagcgccacatgaatcgcggccgggtcgggcatgccggcgtcttcacactggatcaccagggcttccatgtaggctttttcgatacggcgacgacgggcgccgtcgatcaacaaccggcctgccgtggtggccaggaacgcgcgaggttccttgatactttgcggctcggccagcatcagcacgcgaatgaaagcgtcatgggccaggtcggcggcatgctgggaacacccgagtttcttgcgcagccagccgtgcaaccagccgtggtgctcgctgtacatcgccgtgagggtctgctggcgaacggagtcgcccagcgcggccggaatgtcatgcatgcgcaaaaatatctcaaatgggaagagttaccaattgcgcgaacaatgccagtaaaacctgcttggggcaagggcctgtctttaacgccaactccaggacacgccggtatagatgccacgaccatccgccggcgtagagcgcgctacatccaaccccttgtcgtcataacccggcgtcacggtattggcgtaacgacggttggccaggttgcgcaggtcgacccaggcttgccagtcctgcttgggcgcgtcgtagccgaacgtggcgccgagaacggtgtaggacgcggcatagtaggaattggcgtagtccaccgccacccgcgaggaatactcggtgttgaggctggtgtagaaacccgtcggatggctgtagcgcacttgtgcctggtagtagtgcttggggatgcccggcaaggtgttgtcgccgaagcggtcatcgtcacggtagtgaaagtcactgaaggtgtaggcctggcgcagggcaagctggccgttgcggccgccgtcccacagtgggctgagcaggctcagttccacaccctggtgcaccgtggggctggcgttggactcggcgacgatggcattgctggtggaggtttgcgcctgggtttcaacggtgagcagttcgtggcgcacttcggagcggtacagggccaggtcccattggccgagccaggcctcaccgcgcccgccgatctccagagtggtggcggtctggtttttcaggctcacgccctcccgtgccaggcctttggctggaccaccggtaaagtatttgttggaaccccagatcatcgaccacgcatgcggcggctcgaccgagcggctcaggttgccgtacacctgcaattgcggggtgaagtcatagcgcaggccgatgcgtggtgcgtagtcccagtcgtgctggctgagcggcgcctggccttcaggataggtgacctgggtttcgcgacgcgtgtagatcgccgccaggccggtggtcagccacaggtcaggcaccagctccaggtcgttgccgatatgcagcacggtgtcggaacccaggtagctgtagtcgcgggtcttggtgccgggggcgtaggttgctgtattgccagcgggcgtgcgcacgtattccgaagcgccgttgttgggcatcgcctgggtggtgcgcaggccgacagtggttttactgtcatggccaaacagcgtgtcctggcggatgtaattgagggtgctgctgatatcggtgtaggcgactttcaggcggttggtgccttcgcgcaggtccatcgggtagtcgtggtaggccagcccgacttcgacccgggcgttgtcgtccaaatgcaaggtggtcttgttggcgatccaggtggagcccggttgcaggcgcttggaatcacgggctgcgttgaggctgttggccgcacgcgggtcgtggctgatctggctgcgcgtgagcttgcctggggtgtcgttggtggtttcgcggtaacggaagtaaaagcgggtttccaggtccgggttgaagcggtagccgaagttggcggccacgcccttgccggtggcggcgctctggcgctggtagccgtcggattcggaatcagtgaggctgatgtagtagtcggcatcccccagcacctggcctgaactgatctcgcgctgggcataacctttgctgcccgcttcgtaacgcagttgcagcttgggcgcgtcgtagcccgtgcgggtcacgtagttgaccgcgccgcccaaggccagcgcgccctgatcaaaaccgttggcgccgcgcagcacttcgacttggctttgccacagcgggtctttcagctcatagggcgtgccgccggggccggtgagtggcaggccatcgaacatttcatataagccggaagcatgggaaccgggactacggttcaggcccgagccgcgaatcgagagtttcaccccttcgttgttggccgccttggcatacaccccggcctggtacttgaacacgtcttcgttggtgctcacccttccctgctgcacgctgttcatgtcgatatagttggtgccgccgggcacgctcttgagctgcgcctgggccacttcaccgtcgctggcttggctgctggtgacttcaaccggagccagttgcaggtcttcggcgtgcaccagtgagcttaaggtcagggcggcaaacaggagcggaggttggcgcagcagcatcgggcaggtccttggaattcggggggtacgtggtgggaagacaggggcgcccgccaggtcactccttattaacggaccagacccttcctacaccaacgtcggaccgagactattctctgcaggatggtggcagagcagtaggaagtggcgagcgcgcttgtcccgcgttgggctgcgaagcagccccaaaaacagcagccgaagagtgcctgactcaccgcattcttccttccagggtcgcttcgcaacccaacgcgggacaagcccgctcgccaccgatgcagtgttcgtctttaatgggagggtatcagccagatatggccggtttttcaaagaccttgagagggatggcttttaagcctgggaggtttgcgatttcaacctcccgaaaacgcatagattttttcagcagctcacatacagatcactttggggtcgctgtctgttcgaaattgcgaccaacctccccgcgtcgaatgtatcacttggttttgtatcccaggtaaggcagtcgcctgtacgttgacgctttggcctcctgggctgttttctgtgaaaaatctgaagctgatatgacaagtatggggcttatcgtccgtattggtcgcaaacacgtccaatccggactggtcttggcggaccgcagtcgtaaccgcgctggccatcgttgaaaacactactgcaagtgcgcctatcagtaatttcttcattggaaacgtctccgttcattgatcgaaatactgtgaaagccaaactgcagcacagtaacgtcaactgtagctgaaagagcccctgccattgggcgtggcttgaaaatatggccattagccgctatctatacgccctgcgtttaacccgttctgttacacctcgtgaaccacccgcgagcaacggccgagcatggacaggcgaaaaaccggctttcaaaccgagtagggcaagcgaacgtcaaatgagcgaaaagaaacagcaattcagaaatacgtgcatattttgcaaaggtaataaaacctcaaacgagcacattttcccccgttggttaaggcagttcatacccatcgaacggggaagcgacgataaaagctaccatcgcacactggtcacaaaacaacctattgggggtgcatcaacagaagttttcccaaaaaacaccagcaactcggtattgagtactcagaccaagaaagtttgtacaacttgcaataaccaatggatgagtagattagagacagaaatgatgtccctctatgaaaaactacatcgtcaatcgctcaccaccttatcgatggatgaccaacgagccctcagtacgtgggccattttactggcgataaaatgggacctcactgaagtcaacacttcagggtattcagaacgacacacgcatcatgtgttccagcacaagaccccgccacctaacacgaggatttggctgggctactgtgaagacggtcaagtggaaatcaggcataggacaacggttttgctcaaggccaaaccgacacaggcacatccgattaatgttcgatcaacagcgataatgctcggcaccttggtgttgcacattcttagccatgaaacgtccagttatccaataatagtggatgccaacaaacgcaacaaaaaaatggtcttgatatggcctacaacacaagaacttgtcatggatcgatcaatgctcgaaaaagtcacatccgaaaacctgaaatcaatgtctcacttcctaggtatgcagcacagctaccgacacgttgtatcgcttattgcctcactgccagaactttatgctcaaacataacgtaacctgacctgttgacatccgcccgctaggcctactttccagtttggcccaatgctcgcatcagctcctctgcttccgaccctggcggaaggcggaaaccgaacatttcatcagcggccagaatctcgcccaccgcgtcgagtaattgcgcctcggttggcgagtcacgcagcagcttgtgtgccgccagtaacaattcggcgcaaacgccttggacactcgccgcatcgatcacggcaaaaaggataaaacgcaaacgtatttcgcgatcagtgggccaaaccgttttttgcttacccatggtagaggcctcaagctttcggaaaaatccgaggctattgatggcttgagggtgtttcaagcatcaggaggcaagataggtcacttcctacagaagaaagggaaacaccgtaccaatcatcaaaggaagccaggctttattgcaccggcagaaagttcatcagcaataggctctgcgcgtaattgagaccgatgcgccggtagcgttcgtcaagcatctgggtcagcaagtcgagtcgcgctacgattttgccgaactccaccgcgaagctgaggttgctgccctcctccgatatctcgttggagaacaacagcagcacgccattggcatcctggcgcttgctcagcagccaggtggccttctcgatgttgcgtgcggcgttgctgacgaactgcgggttgatcgaatcggtgatgtagaactcggtgcgcccaccgtgggcggtcacgatcatgctgccgatggcgtagataaatgcgccgacgcggtcgcctttgaactccgcactcagggaataactcagcgccgccaggtcacgccgatcacccagggccggcagcgatcgccgctgctcgatggcctggcggatctcgcgcgcagcggtgaccgcatccggatagcccgactgacgccattggctggggttacgcaggtagagcttgctcatcagcagatacaggctttgcaggttgtcgcgcatgccaagcgtggccatgcggtcgacactggtctggaagaactcatcgggcttgccgttgctgaactgcttggcgatatcccgcccctgttgctggctgcaaccgccagcgcagagcatcaacacggcggccagcagcaagggctggcaacagcgcggaaggttgaaacgaagaaacgtgcgatccatcggcacccgatctgattcatctgcccacacgggaaatcggcagggctgggacaaggatagagcggagaaatctaaaaaagtgcagtggaccccggcagatagttgtaagcagagaccaccgggcaggtgaatcggcgcaatcgtgaaggattcgtttcagggcctatactgaaggcaacagcggcgtgtgttgttggcgcatttgctcataagcagctgtataggaggtgacggcaatgaaacatccaattcgggcgcaaatggttgttcagatgatttgcctgctttcggtggctcagcttttttgctgaaaacgtgtcaccggtgtcaaattcagccgtggttgcggcgctgggaggtattgtctgcaacctcctcagcaactggcccgcccccattggccgggccagaacgtgcaactacaacaagaccgtggccagcatgcctagagcccccaggcaaaacccgatcagggcaccccgcccgggtacttcatggaacagcgcccagatcaccacaggctccagcagcaataacgaggtgatggatacgactgtcaccacccagatatcaccgaccgcacgataccccagccagtaagcccccagcagacacagcccggcaaaacacatgaccaccaccggcatgatgaacgcctgccatgaaccgtcgccggcctgagccagcctggcggtgattacctcgctgtagattgcacaaaactcaccaacgaccatcaaccctagagcagaaactccgagtagttctttggacatatcaaaaactccttcgtattcaacgcactgtttttcaactcccagcgggcgatgccgttgccgaggttttcgttgcagcgatacgaagcagccttgaacaggcctgaattaccgaagtgcttttgcatgctcgtgtccttgaaaagggggtgaatcccagcgaccgtagaggacgcccggcctgatcatacgtttggtcaagcgctttgaacaacctgcgcagggcatccaaaattcacaagacgcctagtcgacactcggcctgttcaggctatgatcgccccctatgaaccagaaggctgactgcccatgcccgttgacctggaagccctctatcccaaactgatccacctgatgctggatacagtcttcgtcgtcgacggcgacaaccagattgtgttcgtgagcgatgcctgtgaggcactgctcggctacagcgccgatgaactggtgggcacacccatcacccactacatgcatcctgacgacctggcacgcacccgagcctccattgtccgggtcatgaacggccaaccccatgtcgacttccgtaatcgttatatccgcaaagatggcagcgtcgtgcacatcctgtgggcggcgttctggtccgaagaagtgggcgcgcgcatcggtgtcgcacgggacgtgaccgcactcacccaggccgaagaggagctgcgcttcctcgcccaccatgacccgctgacagccctcaccaaccgttcgctgttcaatgcccggctggatgacgccttgcataccgcacggcttcacaaccagcccctggcgctgctgttcctggacattaatgatttcaagggcatcaacgatgtgcatggccacgccatgggcgaccgcctgctgtgcgtgattgcacgacgactggagcgctgcgtacgcgaaagcgacctggtggcccggatgggcggggatgaattcaccgtactgatgaccgacatcccctcacaggatgcggtgaccggcaaggtcgcgcacttgctcgcggtaatggccgagccgctggggccggagtttggcggggtgaaaatgccgtcctgcagtatcggcgtggccttctatccacggaacgggctggatgccgacacgctgttgagtcacgcggatggggatatgtaccgggtgaaaaggcagcggtttgcgacggattgagaccgatcaacaccgcgcgcgccgattaaaagccaatgccccgacgtgtcggggcattggcttgtgtagtcatgggataatcaaccagaaacgaacatcttttcagaagtttcaactggcaaaagattcatcccaacgtggaatcattatttggcttggcgaagcacaagctccgtcaaacgagtcttgacccggaagcagaactcacgaatttgaaattgataagccggcatgaccatgtagttcaaatcaggacccaacgagtctttgacttccatgtacttagcggtcttggcagcaatggcctggtattgcgcctcgtatttatcgtacgacgctttgttgtacacccttagaacatccagctctttacggcattgctcagcgcgattctggttcaagtttgtttcagactcttcctgagctgcctcctgggagacatggattggggctacaggacgtgggttcgcaggtgcagcctcataccgtacagtgaaattttctggtggtgtcgaaggtgcggcttcagcgggtgcctcatggacgacggctggagggggagtctctttaggtttttctggagttttcgtagcgcatcccgagagagcaagacctaccactacaacgatgccacacattttattcatcggtttcaccaagaggtatttggggttggctgagtcgttaggttctgggtaaaagtcatcactcaatcaatgatagagcgtacattttctaccagactcaaggcgctcagccgctcttccttgagtgcgcaggtgagcaatagtagtaaaaaatcaaagagatgacgaggaaaagcttggcgggaagtgcacaaacccaatgggataatgactgtgcggctttgcttctctaagttcgacgacgcccacatcactcggatgcctgcacccggtaattgggcatggtcttcgttgtgaatactgccggtgtcggtgaggatctcggcttggagtcattcccatacttcgagagccggggttaggcgaatgccgaagtcggataggccggacagctcaagctgtgacgatggagggtatggcctgtccataagttaccttgagcttgaaatagtggcgcattgccggtattcatggcgacttcaaaaagtaaggacgctgatactcatgtcattcgtcaaagccggctcactcttcgtatgccttttgggcgctgcgtcgctcaacggatgcaccgtgggccctcaagcaacgtggaccaacctgggccccggtgggatagcaaccaaacgcagccaaatcgcctgctacacagacgcaaacatcatcgacgggaagcgagtggaaggcacattatgcgcgtttcctacgtccggattcctgagcgacggcgagccaaccgtaatcgcaagaatgggctatgggcagcaatacactttggaattcagcaagacgcttgcggggtttgaactaccattcggcgacaagaagggagttctgaaatgcgaacctatgaagactgagcctggcaggacaatacctgagagcttttgcactctcacggtcaacggccagaaattggtcagcgctaagatactgtttggtggcatgtgacaaccacccgtgccgcactcacctgcggcacacctaaatctacacagtcttcagtagcccgaagcggcttacgctccccactgctggttataggccgcgacgtgctcaggaaagacatcaccgtatggtggatactcgattcctagaacgctcaactctattgcgtcttccccgcaatcaaacgagtagtccgcaatgcacacaccggcagcccgaatcgcctctccgcccacaatacgcactgtaaaattaaaatgtctctgatcacgctgagcaaaggctctgacttgctcctggataatggaatatccaggagcaggaacaaatacgccgaacgccacccccatgggcggatcgccgagctctaaatcggaccaaccgataggctgcccattactgaaagcttcgaatcgcagcatggaaatgacctatcaggcactgctaaatttcccgaagaataacgcatcagcttgatagcgggtattcaggaccgcgggcgtggtcaccactctgcatcatggttgcgagtgcccatgaactggtggcaaggaagtatgctgcggtaccaacatctcccaagctgatgtaaaaaagtactattgcccttgcaagccttcactggattcagaccaacacatgcagatcatccgcactggaacggttttaactggcgaatacgctggttggacaatagaaattcaggatgaccgcgcaggtgaaacgggtggttattacctgttcatggtgcaggacgaatccaatggtttcgattcttggtttgagcgcatagagcagctgcagcaacaaatttcagaactcgacgttcgctggaattagcgtctcactcatgcgctttccttttatccctccccttcaacgtcagccgctatagcggcaagacccaaggtggtatcggaaatcatcgatatcggcgacgccagcctactccagggacacagcgagcaggagatcaccaaacgggtttacagaaggattggcgccactgccaaaccatcaaaataggcaaagtttcggaacgcctatcaaaaaccggcgttacctacccaaaccccagaaacacaaaagccccgctagtgcggggcttttgtttgaatcttggcgggaaaccagggattcgaaccctggagacgctattaacgtccgccggttttcaagaccggtgcattcaaccactctgccaatttcccttgtgcatcacaggattatagtagcctatcccgtctcagcgggcgccataatacccgaatgaaacacactgtcaaactctcgccatagcttgttacagagcgtctgttatgatctttgcgactgaacgtttcaaaactgaaggagtgtcgccatgcgcgaacagaattacgcagtgaatggtaacgcgcaggctgagcagcttgaagtcagccgcgtgttgcgcaacacctatggcctgctcgcccttaccctcgcattcagcggcgtgatggcgttcgtggcccagcagatgcgcgtcggctacccgaatatctttgtggtgctgatcggcttctatggcctgttcttcctcaccaacaaactgcgcgactctgcgtggggcctggtgtcggcatttgccctgaccggcttcatgggctttatcctcggcccgatcctcaaccgttacctcggcatggccggcggcgcggaagtggtcagctcggcgtttgccatgacggcgctggtgtttggtggtctgtcggcctacgtgctgatcacccgcaaggacatgagcttcctgggcggcttcatcaccgctggtttcttcgtgttgctggcggctgtggttgcgagcatgttcttccagatcagcgggctgcaactggcgatcagcgcaggtttcgtgctgttctcctcggtgtgcatcctgttccagaccagcgcgatcatccacggtggtgagcgtaactacatcatggcgaccatcagcctgtatgtgtcgatctacaacctgttcatcagcctgttgcagatcttcggcatcatgagccgcgacgactgattactggctgcaataaaaaacgccccgtatcgaaagatgcggggcatttttgttttcagaaggtcagtactggttgggttccatttccagctcgaccttgaagcgctccagaatatcacgctggatgcgccgggccaggttggcaatgtcgtgccccgaggcaccgccatagttgaccagcaccagcgcctgcagcttgtgcacgccggcatctccttcgcggaagcccttccagccggccttgtcgatcagccagccggctgcgagcttcatctgcccgtcaggttgcgggtaagccaccaggtccggataaagtgcctgcaactcggccgccagcacctgggacaccaacgggttcttgaagaagctgccggcattgccaagttctgccgggtccggcagtttttcgcggcggatgctgcagatggcgcggctgacgtcgctcggcgttgcctcgctgatcccctgcgccgccaggcgctgctggacggggccgtagtcgagtttcaagtgactggcgcggctgagggcgaagcgtacgcgcaggatcagccagcgtccggtctcgtgcttgaacaggctgtcacggtaggcaaagttgcattcctccaggctgaagtcgcgcagttcgccggagtggcgatccagggcggtcaggccggcgaatacatccttgatctcgacaccgtaggcaccgatgttctgcatgggcgcggctccgacggtgccggggatcaggctgaggttttccaggccgcaaaagccctgttccagggtccacagcacaaaggggtgccaggcttctcccgcctcggcctcgaccaccacgtgcaggccatcgtcgtgcagcacgcggatgccttgggtagccatgcgcagcaccagcgccggaatgtcctgggtcagcaacaggttgctaccaccgccgatcaccagcagcggcacattgtgtgcggtggcatatgccagggcctcgcgcacatcgctgtcgctgtgggcctcggcgaacagctgggcacgtacgtcgatgccgaaactgttgaacggcttgagcgatacctgcgcaagcacctgcaaggtcataaccgccccttcaattcgatcaccaataaatcacaggcctgctcgatcaggtccaggacccgttcgaagccttgttcaccctcgtagtacgggtctggcacttcgtccacttcggcatcgtaacggcgcaggaacaggtccagctccgccttgccctgccccggctgcatggccttgaggttgcgcagattgctgtggtccatggccaggatcaggtcatagcgcgcaaagtcggcgcgggacacctgctgggcacgctgggccgacagatcgtagccgcgcgccaacgccgcacgctggctgcgctggtccggcgggttgccgatatgccactcaccggtgccggcggacgccacatcgacctgccccgccagccccgcttcgcgcagtttgtggcgcagcacgccttctgcggtgggcgagcggcagatattgcccaggcagacaaacaggacctccatcaggcccccagcaggcgacggacgcgctcaaggtcttccggggtgtcgacaccggccggtggcgcttccagcgcatcgcccacatggatgcgcacgccgtgccagagcgcccgcagttgctccagggattcggtattttccagccagcacgggccccaactgacgaagtcatgcaggaaacccgcgcggtaggcgtagatgccgatatggcgacggtaaggcacgccttccggcaacacgtccggttgcttggcgaaggcgtcacgtgcccacggtagggtcgaacggctgaacgtcagcgccagaccgttgatatcgctgaccaccttgaccacattcgggttgaacagggtctcgatgtcttcgatcggctcggccagcgtcgccatgcgcgcttcgccatgggcggccaggttggcggccacctggtcgataacaccgggtgggatcaacggttcgtcaccttgcacgttgaccacgatggcgtcgggcgccaggccgagctgtgtggcgacttcggccaggcggtcggtgccggagttgtggtcttcgcgggtcagcaccgcctcagcgccaaagcctttgcaggcctcgatgatgcgcgggtcatcggtggccaccaccacacgctcggcgctgcttttgcaagcctgttcccacaccagctggatcatcggcttgttgccgatcagttgcagcggtttgcccggcaggcgggtcgacgcataacgggagggaatgacaacggtaaaggcggtggtcatttatccaggcgctcatcggtggtcagggtacgggcttcgctttccagcatcaccgggatgccatcacggatcgggtacgccaggccggcgcctttgctgatcagctcggttttgtcggcgctgagcttgagcgggcccttgcagatcgggcaagcgaggatgtcgagcagtttggtgtccatgagtgtttcctgaaaaaagcggtttaaggcaaaagacgggcgggcaacaggcgcatcagctgcgtgtcgaaccaggcgacgaacgccggcgacggcagcgcatccaccgcaaggtaccaccagtcgggctgggcaaaggcgcggcacttcaccgcgtccttttcggtcatgaccagcggcaatgacggcgtaaaattcaggacctcggcactgtagggcgcgtggtcggcaaatgcatggggtatcggctgccagtgtagcgtttcaagggtgttgaagaaacgttgcgggttgccgatgccggcgaccgcatgcacctgctggcccggcgcaaaatgatccaccggccggcgctcgccggtttgcaggttgaccagtgcggtgggctgcaaacgaaaggcaaagccgtcctcgcggtcgctggcggcgccgttgtacagcaacgcatcgacactctgcaggcgctccaccggttcgcgcaacggccccgccggcaggcagcgacggttgcccaggccacgggcggcgtcgatcagcaccagttcaaggtcacgggccaggcggtaatgctgcaggccgtcatcggagaggatcaggtccagggtttcactggccagcagcgcctggaccgcacggctgcgatcggggtcgatcatcagcggtacgccgcagcgctgcacgatcaacaaaggctcgtcacccgccacctcggcgctgtggctggcctcgacacgccacggcaactgcggtggcttggcgccataaccgcgactgaccacgccgacgcgcaagccgctgcgttgacaatgttcgataagccacaggatcaacggcgtcttgccggtaccacccacggtgatattaccgaccaccaccaccggcaccggcgattgatagatctcgccctcacccgccaggaagcgtgcgcgcttgcgctgcaccacccggcgatacaaagactccagcggccgcaacaacgcgagtgccggatggccctcataccaggccttgagcaaacgatcggacatggccatcagggttggctcgccgcctcgacggtgctcatgcgcaagtggctgaaaccgagcttgccggccgcgtccatcgcagtgatcacggcctggtgctgggtcttgccatcagcgctgatggacagcggcaactgcgtgtcgccgccggactctttctgcaaggcctccatcaggctggcgaggtcgtttttctccagcaactggttgttcaccgaaaacaccccgtcggcgctgatggcgatgtccagttgcttgacttgctggtcttcggccggcgaaccgctcacggcttccggcaggtcgacgcgcagttcggtttgccgggtgaaggtggtggtgacgacaaaaaacagcagcaggataaacaccacgtcgatcagcgacgcgaggttgatatcgacattttcccgttgcttgcggcgaaatttcacgctttgcccccaaccaggtccacatcgcggtcgccctgcaccacttccaccaacttgatggcttcctgctccatgcccaccaccagctcatcgatgcgacgttgcaggaaccggtggaagaacaccgaaggaatacccaccatcaggccggcggccgtagtgatcagtgccttggagataccaccggccagcacggccgcattggtggtcatgccggagcccatgaacgaactgaaaatgtcgatcatgcccaacaccgtgccgagcaagccgagcaatggcgccatggcggcgatggtgccgagggcgttgatgtagcgctccagttcatggatgacgcgggcggcggcctcttcgatgcactccttcatgatctcgcgaccatgcttggagttggccaggcctgcggcaaggatctcacccaacggggagttggcgcgcagttccttgagtttttccttgtccagttgcttgttcttgatccagccccagacctgccccagcagatgctcgggggtcacgcggctggcgcgcagggtccacaggcgttcggcgacgatgccgagtgcggcgatagagctcatgatgatcggcaacatcatccagccgccggatttgaccaattcccacacagtgaatgtcccctcgaaaaagtgcgccactttaccatataggtgcgtcagccacagaccccatcggccgaggccttgaccccctagggtaagcgctcgcgccagaacctgcgttgactgcgcgcaacgaccggtggcgcgaatgctcccagttgcacacgcacggccccctgctctgcgctgtcatacacctggctgcccaaccgttgataacgctccatcacctgcggatgcgggtggccgaacgcattgccgcgcccccgcgagatcagcacattgcgcggagagagccgctcgacaaacgcccaggacgaagagctgcgactgccatggtggggcgcctgcagccacgcggtgggcaccgccagggacgaagcgagcatggcctgttcggcgtcgcggtcgatgtcgccggtcagtaacaggcgctcgccattggcctgcacctgcaagacgcaggactttgcattgccactgatggcgccaggccactgccacagttcgaacgttaccccgtcccaggtccatcgttcgccactgacgcagggttgcgtaccgataaacgccggcaacccatcggtttctccgcccaccacacgcttgatcggtatgcccttggcaattgccgccgcaccaccggcatgatccgcgtcggcgtggctgagcagcatgaggtccaatgccccgaccccgagctttcgcaacgacggcagcaccacccgcgcgccgagatcaaaggttccagtgcgcggtccggcgtcgtaaagcaatgcatgatggcgcgtgcgcagaatcagcgactgcccttgcccgacgtccaactgcaccacctccacctgcccgtggggcacctgctctcgcgggggaaacaccgccagtagcaacatcggccagcccagcgtgcgaaagggcacgccgttgggcagcagaagcaacacggcccccaacaggctcaccagccaataccccaaaggtacttgcgccgggatccaggccggcatgtgtccggcgagccacgccagccccttgaacaagccatccagcgcgccgcccgccagccacagaagaccttcgccaatatatggcaatggcagtaatgcagtccccgatagcgccagcggcaacaccaccaggctgatccatggcacagccacgaggttggccagcggtgcgctcaggctgatgggcagtcccagcacccacaacaccggaaacaatccaatggcaatcagccactgaggtcgggtccatgcctgccacaggctccacggccccaaccgcccaccaaacgccagaatcagcactgccaccgccgcaaacgacagccagaaccctggctgcaaactggccaacggttccagcaccaacacaccattgagtgccagcaacaacggccaccataggcccagatgccggaagcgcagccgccacaccaacaccaacccgaccatcacgcaggcccgctgtactggcacgccaaaccctgcgagccagccgtagcccaacgcagcgctgaacgccaggccacacgcccagggcaaccacggccaggttcgcggccagcaaccgtagcgggccaagccggcgatcagcccatagatcaaacccgccagcaaaccgatgtgctggccggagatgaccagcagatgcacggtgcccgtatcctgcaacacttgccaatcggcagtggccagccctgaaccatcccccagcaccagggcaaccaggccggcttcccgaccttgggcgtccaccgccataaggcgctgacgcacgctgtcgcgccaggcattgcgggccggcgccagacgctcgccgtccttgaccgagcccgtggcgccgatgcgttgggccaacagccaggcttcctgatcaaacccgtggaaattcagcaacccggccggacgtttgagggtaaccgccaggcgccaacgttcaccgctgcgcaccggcggcccgccacgccaggacacgcggatgcgtttgggtaagcgggcatttcgcgaccgactatcggccagttcgaagcgcacaccctcgcccgtctgtcgcggcaacccgatcacccgcccctccagccagcgcgtctggccgtccagtgcaggtatcaggcgatcatccaatgcccactgtgcgctgaggcatgcccaactcagccccagcaggaaaaacgccagtgggtaggtacgaaacggcaacaacatcaacgccagcaccggcgtggcaatcagccattccataggcggcaacaccggcaaaaagcgcagggccagcaaccccagcgcaaacgcgcacatccctgtcttcatgaaccatccttttcaagtgatccactcagtcttagccggatgcccagggcggcctatgatgttttgtcacaaagtctgaattttctgtttatagaatgcgggcatacttgcccctcgaactgacctggaccccttatgccccggcgcttattcaaacggtacatgcccgatcccacgagtatcagggaacataagtcattacagtttctcggcacgttgctgcatgacccgaacctctggcacctgaaccggcactcggtcgcacgcgcaatggccgtgggtttgttcgccgcgtttatcccaatcccgcttcagatgctgttggcggcagtcctggcgatcaccgtgcgcggcaatatgcccatcgctatcagcctggtgtggctgaccaacccgattaccatgccggtggtgtttatctgcacctacatgaccggcgcctggctgatgaacgtgccaccgcgcagcctgcccgacgacctcacctggaaatggatcagcggccaactcagcaccttgtggcagccgttcctgctgggttcagtggtgttggggctggtgctgggcgccctcgcctattgcctgaccatgggctactggcgctggtgggtggcccaccagtggaaaaagcgcaaacagcgccgcgcttagcaggcccgcaagcgcaggtgcacgcgcaggccttgcccggtattttccgcccacaggctgccgtcctggcgctgcacggcgttgcgggcgatgctcaggcccagcccgaagccgccatcgccggggcgtgaaccgtcaaggcgggtaaaaggcgcgaagatccgctccaggtccccgtcatcgatcccgccgccctggtcctccagccagacatgccaataatcaccttcgcgacgcccgtccaggctgaccacgccgcccgacggtgagtggcggatagcgttgcgcaagatgttttccagggcctgcgccaacgcattcaggttgcctcgcacccagcattccgcccccaacaggcatggcagccgcgaccccggccagtcgctctcatagcaggcgttttcacgcaacatgtcccacagcgcctgaagctggatagcttcctggggcagcggcgcgcgttcggtgtcgagccaggccagttgcaggctgtcttccaccaggcgctgcatcgcgtcgatttcacggccgagccgctcgcgcagttgcgccaggtcttgctcactgtcacaggccactcgcaggcgactcagcggggtgcgcagttcatgggacatgtcccgcagcaactgttgctgcaacaccacggtgccctgcaaacgctcggacatatggtcgaacgcacgccccagttcgcccagctcatcctggcgactggtggcgtcgtgggacaaacgcgtgttcaactgatcggcacgccaggcattggcctgctcacgcagttgattgaggggcatgatcagcagccgatacaacccaatacacagcaaaagggtaaacaggccgggaatcaccccgttggtcaccacccgccagaacagttgatagcgccccggcatgaagcgttgcggcaactcgatcaccagcgaccccgcatgggggtcgcccggaaacgggatcttcagccacggcaggcctttgacatgccggctcaccggccaatccaggccacgcagaaaggtcaggcgctggctttcgttgtcgctcagcgggatgctgctcaacgattgcaggtcattgccgatcacacctatccaggtgctttcgcgcttgcccatcgcctgcagccaggcgtcgacgccggcattgccgccgcgattccacgcctgttcagcaccgaccgcgtacccactcaaggtgattcgcgccgcatcggacaggtaggcgttcttctgctccatgtagcggccccaggaccagctgagccagatcatcaacaagcaaaaggcgatcagcaggcaggcgagtttccagaataacgagtgcctgcccggcagccttttcaacgggcgttcaaaggccgtcatcgtgaccgctcagcacatagcccttgccccacacggtgcgcacttcgcgctcggtgtagccgatggccttgagcttgcggcggatctggctgatatgcatgtcgaggctgcggtcatggggcgcataaccgcgttgcagcacatgctggtacaagaaaggtttgctgaggacttcttcactgttgcggtgcagggtttccagcagccggtattcgctgcgggtcaggccggcccaatggtccaggtggaaaacatcgcacagctcatcgtcaaagcgcagcgcgcgggcatcgtcgcacaccggtgccggaatcggcaacggacgccggtcgagggccactcgacgcaggatagcttcgatgcgcacgcgcagctcgatcatgctgaacggcttgggcaggtagtcatcggctcccaggcgaaaaccgctgacgcgatcggcttcagcacccagtgcggacatcaggatcaccgggatcgaatggctctggcgcagatgagtgaggatcgacaggccatccatgcccggcaacaggatgtccatcaacaccacgtcaaaggcctgctcgcgcgccatctgcaggccctgctggccattctggcaccaggtcacgtggaaaccacagcggcccaggtgctcatggacataagcgcccagcacggggtcatcttcaatggtcaggatactgggtaggccaattgctgcgggattcattagtatctgcaagtcattctcaatggctgattattcaagattaccccgccacaggcaatcgccaccgggcgccgaatggcgcgaagattgccgtatgtcattaatttgcaagattccacgctgcgcaaatggctacactgcgcaggtggcgcgggccggatgcccgtgtgaatcatcgatatcaatgtggtagcaggagagtggcgtgctgacaagaatggggataaaaggccgcgtactgttgctgaccttattaccgaccagcctgatggcttcgttgctgggcggctatttcacctggatgcagttgtcggaactgcagacccagttgctgcaacgtggcgaaatgatcgccgagcagttggcgccactggtggcgcccgccttgagtgcacgcaacaccgacctgctggagcgcatcgccacccagtccctggagcagccggacgtgcgcactgtgtcgttcctcagcccggaccgtgcgaccctcgcccacgccggcccgaccatgctcaaccaggcccccatcggcaacagctcacacctgttgcaacgcaccggcaatgacgccacgcgctacctgctgccggtgtttggccgccatcgcaacctcgccggcgacctgatcccggatgaagccgaccgcctgctgggctgggtcgaggtggaactgtcccacaatggcatgttgctgcgtggctaccgcagcctgttcgccagcctgctgctgatcgccatcggcctgatctgcaccgcggcactggccctgcgcatcagccgcaccatcaacgcgccaatcggccagatcaagcaagccgtggcccagctcaaggacggcaacctggaaacccgcctgccgcccctgggcagccaggaactggaccagctcgcctctggcatcaaccgcatggccgagaccctgcagaacgcccaggaagaactgcaacacagcatcgaccaggccaccgaagacgtacgccagaacctggaaaccatcgagatccagaacatcgagctggacctggcacgcaaggaggccctggaggccagccgcatcaagtcggagttcctggccaacatgagccatgagatccgcacgccgctcaacggcatcctcggctttacccatttattgcaaaagagcgagctgaccccgcgtcaactcgactacctgggcaccatcgaaaaatccgccgacaacctgctgggcattatcaacgagatcctcgacttctcgaaaatcgaagccggcaaactggtcctcgacagcatcccgttcaacctgcgggacttgctgcaagacaccctgaccatcctcgcccccgccgcccatgccaagcagctcgaattggtcagcctggtctaccgtgacacgccgctggcgctggtgggcgacccgttgcgcctcaagcaaattctcaccaacctgatcagcaacgcgatcaagttcacccgcgaaggcaccatcgtggcccgggcgatgatcgaggacgagcaggaagacagcgtgcaattgcgcatcagcgtgcaggacaccggtatcggcctgtccagccaggacgtacgcgccctgttccaggccttcagccaggctgacaattcactgtcgcgccaacccggcggtacgggcttgggcctggtgatctccaagcgcctgatcgaacagatgggcggcgaaatcggcgtcgacagcacacccggcgaaggctctgagttctggatcagcctgaacctgcccaagacccgcgacgacgtggaggacctgccgtccgcgcctctgctgggccatcgtgtcgccttgctggaaaaccacgaactggcacgccaggcgctgcaacaccaactggaagactgcggcctggaagtcacgccgttcaccagcctggaaagcctgaccaacggcatcaccagtgcccaccagaccgagcaggccattgaccttgcggtgctcggcgtcacggccaacgatatcccgcccgagcgcctcaaccaacacctgtgggacctcgaacacctgggctgcaaagtgctggtgctgtgccccaccaccgaacagatgctgttcaaccagtcggtgcccaaccccaacagtcaattgcaggccaagccggcgtgcacgcgcaaactgcgccgtgccttgtccgacctgatcagcccacgcccgacacgcagcgaacccggcgaaccgttgtccagccgggcgccacgcgtcctgtgcgtggatgacaatccggcgaacctgttgctggtccagaccctgctggaagacatgggcgcccgggtgcatgccgtggaaagcggttatgcagccgtcgacgcagtgaagcaggacaccttcgaccttgtgctgatggatgtgcaaatgcccggcatggatggccgccaaagcaccgaggcgatccgccagtgggaaagcgaacgcagcggcacgccattgccggtagtcgccctcaccgcccacgccatggccaatgaaaaacgcgccttgctgcaaagcggcatggacgactacctgaccaagcccatcagcgaacgccaactggcccaggtggtgctgaaatggaccggcctggccctgcgcaatcagggtccggagcgcacgaccgacaacctcggccctggcgtgaaactgccggtgctcgaccacgaggaagggctgcgcctggcggccggcaaagcggacctggcggcggatatgctcgcgatgttgctggcttccctggaggccgaccgcctggccatcacccaggcccgtgaggccaatgacaacaacgccctgatcgaacgcgtgcatcgcctgcacggcgcaacgcgttactgcggcgtaccgcaactgcgggcatgctgccagcgcgccgaaaccctgctcaagcaggacgacgccaaggccatgcatgcgctggacgaactggacatggcgattgcccggctggccagtgaggcgcgggtcagcgcctgaagctactttgacgccgatcaattgtgggagggggcttgcccccgatagcgtcgcatcagtcgaagcatctgtagctgacacaccctaatcgggggcaagccccctcccacagttgtccagcatttccaacagattaattgcggggagccttttgatgcgcgtgattcttttcagcagccaaacctacgaccgcgacagctttctcggcgaaccattgccgcctggcctggagctgcaattccaacccgcacggctcaacctcgacaccgtggctttggccgaacatcacgaagtggtctgcgcctttatcaacgatgacctcagcgccccggtgctggaacagttggccaagggcggcacacggttgatcgccctgcgctcggcgggctacaaccatgtggacctgcccgtcgccaagcgcctgggcctgaccatcgtgcgcgtgccggcctattcgccccatgcggtggccgaacacgcggtcgcgctgattctcgccctcaaccgtcgcctgcaccgcgcctacaaccgcacccgcgacggcgatttcagcctgcatggcctcaccggtttcgacctggtcggcaagaccgtcggcgtggtcggcaccgggcagatcggcgccaccttcgccaaaatcatggccggcttcggttgccagttgctcgcctacgaccccttccccaacccgcaggtacaggccttgggtgcacgctacgtgagcctgcccgaactgttggcccaggcgcagatcatcagcctgcactgcccgttgacggccgacagcaaacacctggtcaacgcccgttccctggcgcagatgcaaaccggtgcgatgctgatcaacaccggtcgcggtggcctggtcgacaccccagcgctgatcgaggcgctcaaggacggccagctcggctaccttgggctggatgtgtatgaggaagaagcgcagttgtttttcgaggaccgctccgacctgcccttgcaggacgacgtacttgcacgcctgctgaccttccccaacgtgatcattaccgcgcaccaggcgtttctcacccgcgaggccctggccgccatcgccggcaccacgttggccaacattgccgcgtgggccgatggccgggcacagaacctcgtcgaaggatgatcagcggtcacataccaggctcatgatgagccagcacccgtgataggatgccgcgcctatttggaggatccatggccgaacacgatttccgcttcagtttgctgagcccgcaacacaccctgatcgaatgccgcgccctggtgccgggccgttaccaggtcaccggcaacggtggttcgatcaagcatggcgacgtgctgatcgtctccctgcgcggcagtaaaaccctgtcgatgcgcctcactgtcgaaggtgacgcgcgctactccatccgcccggcaggccaatgggtcgccatggcccaggggccgaagttcggcgagttggagattcacacctggaaggtcaactgcgacagctgcgacgccgtgttggacttcgagtttgcagtggaaaccaagctgagcaaagagccactgcaacccgccgccaatgcgcggatcgccgagttgggctgggccagcgagggcgacaagcaccgctgcccgaaatgccagaaggctgcgcaatgagaggcctgttgctgcttgccgccctcggggcgggcctgaccggctgcgccggcgacgcggtcaagctccagcaggatcacagctacgtagtggaatggattggtgagcggccgctgatggactacgcgcacctgaccgtcaccctcggcgccgatggccgcgcctacggcaatggcggctgcaaccattggttcgcgccttacaccgtcgagggcaaaaagctcagcttcggccagatcggcagcacccgcaagctctgcgccgaagccttgatggagcaggaacaccgcttcttccaggccctgcaaggcgtacagcgctgggatatctcgccgatcgagcagacgcgcttctggccggccgagggcaagccgatccgcctgtggctcgaagaaggctgataccgccgatcggtaggttggtgggatccatatgtgggagggggcttgcccccgatggcggtgtaacagtcaactgatggagtgactgacacacagctatcgggggcaagccccctcccacatttgattccgggtagcccctagccgcgcaaggccttgagcttggccagcacgccttgcgccgtctgctcgcccatcaacgtttcgcgcaccttgcccttgtcatcgatgatgtaggtcaccggtagcgcttcactgcgtggaatatcgaaaatctcttccgggttctgcgccagcaccgtgaacttgatgcccagcttgtcgctggcggctttcagctcttcgccctgcacattgtcgaagttgaccccgaacacacccacattctgcgccttcagctgtgcggccagtgcgttgagctcagggatttccgtgcggcacgggccacaccattcggcccagtaattgaccaccagccactgcttgtccaagcgttcggacgctaccttctggccatattggtcaacgccgtaatcgttaccgcagccgctgagcagcagggttgtgatgatcgccaatgcaccgatcagtcgcctagtcatggggtaatccttcgcaaaaatgaacgttggctgcggcctatcgcctcttacggtttaaggacaggtcgctgcgcgggtagaatacccgccaccttacgcaagatgcgacccgcacatgaccgatctgacgctttatcacaacccgcgctgctcgaaatcccgcggtgcgctgcaactgctggaagcccgtggcctcacccccaccgtcgtacactacctggaaaccccgctggatgccgcgcaactcaaggcgctgctcggcaaactgggtatcagcgcgcgccaactgctgcgcagcggtgaagatgaatacaaggcgctcaacctggctgacgccagcctcagcgaagcccagttgatcgccgccattgccgatcacccgaagctgatggaacgcccgatcctggaaaccgccgacaaagccatcatcggccgtccgccggaaaacgtactggagatcctgccgtgacgccgccgtatgtgctggtgctgtattacagccgcaacggctcggtgagcgaaatggcccggcagattgcccgaggcatcgagcaaggcgggatggaggcgcgcttgcgcaccgtgccggcgatctccaccgagtgcgaagcggtggcaccgagcattccggatgaaggcgcgttgtatgccagcctcgacgacctgaaacactgctccggcctggccctgggcagcccgacccgcttcggcaatatggcggcgccgctcaagtacttcatcgacggcaccagcaacctgtggctcaccggcgccctcgtcggcaagcccgcgggtgtgtttacctccaccgccagcctgcacggcggccaggaaaccacgctgatgtcgatgctgctgccgttgctgcaccacggcatgctgatcaccggcctgccctacagcgaacaggccttgctcgatacccagggcggcggcacgccgtatggcgccagccaccacgccgggcctgacggcaagcgcatgctcgaccagcacgagatcgccctgtgtcgcgccttgggcctgcgcctggcgaacaccgccaccttgctggagggcggtcgtggccaggaagcctaaggtcctgccgccccaggcgtggttggagccacgggtcaaggtggctcgcgcactcagcctgctggcgttttttggcctggtcggtttgctctgcgtgtattacctgttcgtcgccgacctgcacggcgcacggccgtgggtgatcctgctgatcgaactggtgccgctgctggtgctgacgcccggcatgctgctgggcagcgcgcgcggccattcgtggatgtgctttgtggtgaacctgtatttcatcaagggcgcgctggcggcgtatgacccgaaccggcagtggttcggggtgctggaaatgctggcgagcctggcggtgttttgtacggcgttgttgtatgtgcgctggcggcatcagttgaaccgacagctggcagcggcctgaagtccctcatcgggggcaagccccctcccacactgttaccgcgccgcctatccaatgtgggagggggcttgcccccgatggcaccaccccggcctcaatggttgacggtgtacgccaacatcatcgacaactggcacatcggccgcccgctctcggcgtgccactgattgaacgcaccctgcaccgtcgccaggtcgcgcaggctggtcggcgccttatcgacgatcttctgcgcgttcaacgccgccaccacgtcatcactcggcacaaaggtgtccttgccgaccatgcgcaaaaagcgcggcgcggacagcccgccaagctggtggccgtgcttgctcaggtacttccacagcccgacgatgtcggtcaccggccaatcggcgatgaacgcgccaaagctgcccttctcctgctggatatcgaggatcatctgcgcgttgcgcggcacgctcttgagcttgcccaggtggcggatgatgctggtgtcctgcatcagccgctccaggtgctcggcccccatcagcactaccttttccggatcgaagccgaaaaacaccttttcgaacgccggccacttggcgtccaccacactgtgcttcaagcccgcacgaaacacgcgcagcgccagggtcgacaggtagcgatcatcactgatcttgcgcaattgcgctggggtcttgggtgcaggcagatgggcttccagctcggccgcagaaccgaagcgattcagacaatattcgtgcagccacttgtaatcgcgcatgccctctcctggcaattgaattgaaaacggcgcccgcgagcgccgtgtgtcagagccttgaagggactcagaggttcacaacattgacgaagcgcgacgcggcggtttcatcaattttcaggctggtgaagtcaaacaggttgcggtcggccaattgcgaagggatcacgttctgcaggctgcggaagatgctttcggtacggcccggggtcttgcgttcccagtccagcagcatttccttgaccacctggcgttgcagattctcctgggaaccacacaggttgcacgggatgatcgggaattgcttgaagtcggagtaggcctggatgtctttctcgttgcaatacgccagcgggcggatcaccacgttgcgcccgtcatcggcacgcagcttgggcggcatggccttgagcgagccgttgaagaacatattgaggaagaaggtctcgacgatgtcgtcgcgatggtgacccagggccattttggtcgcgccgatttcatcggcgaaggtgtatagcgtgccacggcgcaggcgtgagcacagcgagcaggtggtcttgccttccggaatcagttccttgaccaccgaataggtgtctttctcaacaatgtggtactcgatgcccagctccttgaggtaggccggcagcacgtgctcgggaaaacccggttgtttctggtccatgttgacggcaacgatctcgaacttgatcggcgcgaccttttgcaggtgcagcagcacgtcgagcatggtgtagctgtctttgccgccggagaggcagaccatgaccttgtcgccgtcctcgatcatattgaaatcggcgaccgcttcaccagccaggcgacgcaggcgtttttgcagtttgttctggttgaccgtaagagtgcccatggcgcttggatccgctagaggtgtgtgacgaaaagccgagtattttaccggtaagaatcaccgagttccattgcgggagggggcttgcccccgattgcggcgtctcagcgactcattgatagctgacacaacgccatcgggggcaagccccctcccactatgatcagcgtccagtcaaaagacctcagcgcgattaaccccaacgtttacagcgcaatttgctctaaaggccctacagttattcaggctatcccttcctatactgcgactagaggtcgcacagctatccaggacctttgaggccatttggcccgtgggcgctccgatggggggcgatggcaataacgacaggagtgactggcatgatccatcatgtcgtggggctttttacccatcccgaccaggaatggcgggaaatccgtggcgataaagaagaaagcatcggccacatgtacctcacccataccttgattcttgcggcgattcccgccgtatccgcgtttatcggcaccacccaggtcggctgggtcatcggcaaccgcgcgccggtgatgctgacccaggaaagcgcattgtggatgaccctgatgtcctacgccgcgatgctcggtggcgtggcggtgatgggcgcgttcattcactggatggcgcgcacctacgacgccaatcccagcatggcgcgctgtgtggcgtttgccacctacaccgccacaccgctgttcattggcgggctggcggcgctctatccacacatgtggctgggcatggtggtgggcacggcggccatctgttacacggtgtacctgctatacgttggcgtgccgacctttatgaacatcgatccggatgaaggcttcctgttttccagttccatactggcggtaggattggtggtactggtagcgatcatggcctttaccgtgatcgtctggggcctgggcgtaggtcccatctacaccaactgagcggaaaaaaacccaggcaaagccaccgcaaggtggctttgtgcatcatgcatgaccattcggcgcctgacagattcggaaacacccagctttgcggcatactggacatctctggagatatgtacagcatgcccgagcaactcaatacccgcgtcgaagattgtttcctgctagccgaatcctttttcaaacgaagcttcaaacgccctcaggtcagcctcaagctgcggggccagaaggccggtgtcgcgcatttgcacgagaacctgctgcgcttcaacccacagctgtaccgtgaaaacagccaacatttcctgaagcagaccgtcgcccatgaagtggcgcacctgattgcccaccaattgtttggcgaacgcatccagccccacggcgaggaatggcaattgatcatgcgcggggtctacgaactgccgccggaccgttgccacacctatgccgtgaagcgccgccaggtcactcgctatatctacaagtgcccgtgcgcagacagtgactttccgttttcgtcacagcgccatgggatggtcgcccagggtcgaaggtatttgtgtcggcggtgccggcagaccttggtgtttaccggcgaaacccgggtggagtgagggcctcatcgggggcaagccccctcccacatagtgaccgcgccgccgacccagtgtgggagggagcttgctcccgatggcgccggtccagtcacccgactaccttggcccgccgcaaagcctctatccgctgaacactgaaccccaactccgccagcacctcatcactgtgcgcccccacggcggcgccaatatgcctgggctcaggcagcccctcggagaactttagcgggcacgccaattgcgcctgggtcgaaccatcgccccgtggcacctggctgaccagttgccgcgctttaagctgcggatgctccaccgcttcactcaggctcaacaccggctccacacacgcatccaccccggcaaacaactcacacaactcatcaaagctgcgtttctcgaattcaacctgcagtgcctgcttgagtgcgggcgacaagcccagcgccgccaactccggccgtcccagcgcgccacagagctgctgcataaacccaggctccaggctgcccactgacatccaacgcccgtcccgcgagcggtaataatcgtaaaagctgccaccgttcagcacatggctttcgcattcaggctcgacgtcgcacgccaggtagcccgcgccggccatggcgttcaggctgaacgagcagtcggtcatgctcacatccagagactggccgaccccgctctgctgccgggcgatgactgccgcgagcagccccaccaccgcatgcagcgagcccccgcccacgtccgccaactgcacgcccagtggcaacggtccactgtcctggcgcccggtgtagctggcgattccggccagcgccaggtaattgatgtcatgcccggcgcggtccttatacgggccggtctgaccgtaaccggtgatcgacacataaatgagccggggattgatcgccttcaacgcctcatagcccaagcccaggcgctccatcaccccaggccggaactgttcgaggacgatgtcgtagtccttgaccagcgtccgcacgatctccagcgcctcggcctgcttgaggtccagcgccaggctgcgcttattgcggttgaggtaggcgtggctggccgacgtgccctggtcgtggggcggcagtacgcgcaacaggtccatgcgcgtgggcgattcgatgcgcagcacctcggcgcccatgtccgccagcatcagcgacgcgaacgggccaggcagcaaggtggaaaaatccagcactttgagggacgccaagggacctgacatgggcactccatttcggttttgaatgcccacagactaggcagccttgcgccagtcggcaatcgccggaacagtcaccaacagtgaccgttttgatcacggcgggctttttcgtggcggcggctttatcattggcccacgtttgcttgcagagtgttccatgaagtttgcgattgcagtgttttgtgccgcccatgcgccctcctcgcgccgcgccctgctgttcgcccaggcggcgctggccggcgggcatgagattgtgcggctgtttttctatcaggacggcgtgtacagcgcgtccaattcggtggttgcgccccaggatgagcaggacatcgcccgtcaatggcgggagtttgtcagcgcgcatcaactcgacagcgtggtgtgcatcgctgccgccttgcgccgtggcgtgctcaaccaggaagaagccacgcgttatcaacgcagtgcggtcaacctcgatgcgccgtgggagctgtcgggcttggggcaattgcatgacgccgcgcaggccgccgaccgcctgatctgttttggagggccgtgacatgtccaaatccttgctggtcatcagccgccaggcgccgtggtccggccccagcgcgcgcgaagcgctggacatcgtgctggccgggggcgcgttcgatctgcccattggcctgctgttcctcgatgacggcgtattccagctggcgccgcatcaagacgccaaggccgtgcagcaaaaggacctcagcgccaatctgcacgcgctgggcctgttcggtatcgacgaggtattcgcctgtagccatagcctggccgagcgcggcctcacgacgcccgccagcgcacagccgctggacagtgctgcgatctcccagttgattgaccgttacgaccaggtgataaccctctgatgtcgactctacatgtggtttcccactccccgtttaccgatagccgcctggacagctgcctgcgtatctgtggcgtaaatgacgccatcctgctctgcggcgacggcgcctacgggttgcacaacgcggcgctgcacaccaaaggcgtgaaggtgtttgtactggccgaagacatgcaggcgcgcaacctgccactgcccgactgggccgacagcgtggactacccaggcttcgtgcagttgtcgctcgactacgacaaggtcaacagctggctatgaacaccctgaccgtaggcactcgcagcctggaactggacaaggacggctaccttgtcgacctgaacgcgtggtccgaagaagtcgccaacgccctggccgccgccgaaccgctggcgttgaccgcggaccattgggaaatcctcacactgctgcgccagttctatgccgaattccagctgtcacccgccacgcgcccgctgatcaagtacaccgccttgaagctgggcccggaaaagggcaacagcctgcacctcaacaaactgttcaacggcactcccgccaaactcgccgccaagctggcgggcctgcccaggccgacgaattgcttatgaccgactttgccccgctgacccttgaaacccctgccgaacacccgtttgcgcaattcgtgcgcatcctgggcaaaggcaagcgcggtgcgcgcaacctcacccgtgaggaggcgcgcgaagccatgggcatgctgctcgacgaaaaagtcgaggacacccagctcggcgccttcctcatgctgctgcgccacaaggaagaaagcccggaagaactggccggtttcaccgaagccgtacgcgaacgcctgaacgctccggcgctgaatgtggacgtcgactggccgacctacgccggcaagaaacgccacctgccgtggtacctgctggcagccaagtgcctggcgcaaaacggcgtgcgcatcctgatgcacggcggcggcgcccacacggcgggacggctgtacaccgagcaattgctggagggtttgcagatcccgctgtgccgcaactggcagcaggtcgaagccgcctacgcacgcggcagcctggcctttatcccgctgggtgactgggcgccgcagttgcaacgcatgatcgacctgcgcaacaccctgggcctgcgctcgccgatccactccctggcgcgcttgctcaaccccttgaatgcgcgccttggcctgcaaagtattttccatccgggttaccagggcgtgcaccgcgatgccagcggcctgctcggcgacaatgtaatcgtggtgaagggcgacggcggcgagatcgagatcaatcccgactcggccagtcacctgtacggcaccactggaggcgaaagctgggacgaagagtggcccgccctctccgcccagcgccacgtcaaaccggccacactcgaacctgagcatctgaaagcgctgtggcgcggtgatgtcgaggacagctacccacaactggccctgatcgcgaccatggccctagccttgcgtggcctgggtcattcacgggaacaagcgttcgccctggcccagcaatactgggacgcgcgggacaaatcgatttaatcgatgattaacccccggtctttgcgcttttagttcgaactcatccctttagactgggctccaacgcttattagcctaggagccagtcatgggtttgctgatcgaaggacgctggaaagaccagtggtacgaaagtagcgcggacggcgcgttccagcgcgaacaggcgcaacgccgccactgggtcaccgccgatggcgcgcccggcccgagtggcgaaggcggcttcaaagccgaggccggtcgctaccacctctatgtctccctggcctgcccgtgggcccatcgcacgctgatcctgcgcaagctcaagggcctggaaagcctgatcgacgtgtcggtggtcagctggctgatgctggaaaacggctggacctttgacaaggcccacggttccaccggcgacaagctgggtgatttcgacttcatgcaccagcgctataccgccgacaccgccgattacaccggacgcgtcaccgttccggtgctgtgggacaaaaagctcaagcgcatcgtcagcaatgaatcggcggagatcatccgcatgttcaacgacgccttcaatgaattgaccggcaacaccctggacttctacccccagccgctgcgcacgaccattgacgcgttgaacgaacgcatttacccggcagtgaacaacggcgtataccgcgcaggcttcgccacctcacagcaagcgtatgaaagtgcgtttgatgatgtgttcgccgagctggatcatctggaacagcacttgggcgaccatcgttacctggccggtgaatacctgaccgaggcagatgtgcggctgttcaccacgctgattcgttttgatgcggtgtactacagccacttcaaatgcaatttgcgcaggattgcggattatccgaatttgtcgaattggttgagggagctgtatcagtggccgggagtggcggagacggtggattttgcgcacatcaaggggcattactatgccagccatcgcacgatcaatccgacagggattgtgccgaaggggccgttgcaggggtttgatgaacagcacgatcggaagcaattgattggcaaaggcgtgtggaactgatccgacgtattggctggcttttagggcctcatcgggggcaagccccctcccacactggaatgcagtccaatgtgggagggggcttgcccccgatgctttcaaggctcagacctgggactgcgcgccctcaaaccacttcagcttctcgcgcaacaccaccacctcacccacgatcaccagtgtcggcgcatgcacttcatgctccgccaccatgcgtggcaaatcggcgagggtgccggtgaacacgcgctgattggacgtggtgccctgctggatcaacgctgcgggggtgtccgatgcacgcccgtgcttgatcagctgttcgcagatgatcggcaagccgatcaagcccatgtagaacaccagagtctgcgaaggtcccaccaggtcatgccagggcaggtccgaggtcccgtccttcaaatgcccggtgataaaacgcaccgactgcgcatagtcgcgatgggtcagcggaatcccggcatatgccgcgcaaccgctggccgcggtgatccccggcaccacctggaacgggatgccatgggcggccagttcctcgatctcttcgccaccacgaccaaagatgaacggatcgccacccttgaggcgcagcacgcgcttgccctgcttggccaggtccaccaattgctggttgatctggtcttgcggtacggcatgatcagcgcgacgtttgccgacatagatgcgctcggcatcacggcggcacagttcgagaatcgccggtgcaaccaggcggtcatacagcacaacgtcggcttgctgcatcaggcgcagggcacggaaggtcagcaggtcgggatcacccggacccgcgcccaccaaataaacctcgcccggcgcataaggcggcgcgccgttgaccttttcgatcagcaggcgctcggcctcatcaccctgcccggccaactggcggtcagcaatcgggccctggaacacttcttcccagaacgcacgacgctgctgcacatccgggtacaagcctttgacctgggcacgaaaacgcgccgccagcccggccagttgaccgtaggtggacggaatccaggtttccagcttggcgcggatcaagcgcgccagcaccggcgcatcgccgccgctggacactgcgatcaccaacggtgaacggtcgacaatcgccgggaagatcacgctgcacaaggctggcgcatcgaccacgttgaccggcacgcaacgacgcttggcatcgctggacacttgcgcgttcagcggctcgtcgtcggttgccgcgatgatcagggtgcaagcatcgaggtcggcctcctgatagccgcgcagaatcagttccccgccactgcccagtaccagttcacgcaactggtcttcgatctggggagcaaccacccgcagcaccgccccggcgtcggccagcagccgggatttgcgcaaggcaatctccccgccaccgacgaccagcacacgactgccgcgcaggttatgaaacagcggcagaaattccatttagcgaatgacctcaacgcccgccatgtacggcttgagcacttccggcacacggatcgagccgtcagcctgctggtagttttccagcacggccaccagggtacggccaaccgccaggccggaaccgttgagggtgtgcaccagctccggcttgccggtttccgggttgcggaaacgcgcctgcatgcgacgggcctggaaatcaccgcagttggagcacgacgaaatctcgcggtacttgtcctggctcggcacccagacttcgaggtcgtaggtcttcacggcgctgaagcccatgtcgccagtgcacagcgccagtacgcggtacggcagctccagcagttgcaggacacgctcggcgttggcggtcaggccttccagtgcgtccatggaggtcgatggctcgacgatctgcaccatctcgaccttgtcgaactggtgctggcggatcatgccgcgggtgtcgcggccggaggcgccggcttcgctgcggaagcacgggctgtgggcgacgaacttgatcggcagttgcttggcgtcgaggatctcgccggagacgatgttggtcagcgacacttcggcggtcgggatcaggtacaggtcggcttcgccgtcgcggctgatcttgaacaggtcttcttcgaacttcggcaactggctggtgcccatcagcgccggcgcctgcaccaggtacggggtgtaggcctcttcgtaaccgtgctcgccggtgtgcaggttgatcatgaactgcgccagggcacggtgcaggcgtgcaaccgggccacgcagcagcgagaagcgcgcgccggacatcttggcggcggtttcgaaatccaggccaccgctcagttcgcccagggcgacgtggtccttgatctcgaaatcaaaggctttcggcgtaccccagcgacgcacttcgacgttgccgtcttcgtctgcgccgatcggcacggattcgtgcggaatgttagggatgcccagcaggatcgaatccagctcggactggatcttttccagctcgaccttaccctcggacagctcggtgcccatgcgctcgacatccgccatcaacggcgcgatgtcttcgccgcgctgcttggcctgaccaatggatttggaacgcgcattacgctcagcctgcagtgcttcggtgcgggtctggacggtcttgcgctgttcttccagcgcttcgatgcgcgcaacatccaaggcaaagccacgggatgccaggcggtccgctacgtcctgaaggttgctacgtaacagtttggaatcgagcatgtcggtctctcgtttatcaaagtttggtcaaggacaggccggcccaggtggcgagcagcccgccgaatacgctgatggccgcatagccaattgccagcggcacttgcccgctttccagcaggcgcacggtatccagtgaaaaggatgaaaaagtcgtcaggccgccaagaaagccaaccatcaggccggcacgtacctcgataggcacttccgggcgcagcaaaaacaggccgtataacacgccgatcaacaggcagcccacgatattaacggcgagcgtcgccgtatagaagtgtttcggccaattggcgttgatccaattgcccgtggcaaagcgcagcagtgtacctgcgataccacccgccgaaacggcgacaaccagaggaatcatgactttctccgctgccgggggctcaggcggtcgagggtggcaaggtgattaagcttttcaccaatcttcagctccaggccacgaggcaccggctgatacaacggcaacggctcaagctcatcgggaaaatagtcttcaccggccgcataggcatccggttcatcatgggcgtaacggtattcatcgccataacccagctgcttcatcagcttggtcggcgcattgcgcaagtgcatcggcacttcgagcgagccatattcggcggcggcgcgcagggcggatttgaagcccatgtaaaccgcattgctttttggcgcgcaggccaggtaggtgatggcctgggccaccgccaactcaccttccgggctgcctagtcgttcctgcacgtcccatgccgccaggcacaggctcagggcacgcgggtcggcgttgccgatgtcttcgctggccatgcgcaccacgcggcgggccaggtacagcgggtcgcaaccgccgtcgatcatgcgtgcaaaccagtacagcgcaccatcggggttggagccgcgcacggatttgtgcagcgccgagatctggtcgtagaaggcttcaccgcccttgtcgaagcggcggcgcgtgtcgccgagcaggctttgcaggaggtcgacgccaatctcaccgccgtcttcggccaggtcggaggcgttttccaacaggttgaggaaacgacgaccatcgccatcggcggccgtcagcaggatcttgaagccctcttcgctcacgctcagttggcgcttgcccaagcccttgtcttcgttcaaggcgcgctgcagcagcttctgcatcgccgcctcgtccaggcttttcagcacatagacccgcgcccgcgacagcaaggcgttgttcaattcaaacgaagggttctcagtggtggcaccgataaagatcagcgtgccgtcctccacatagggcaggaacgcatcctgttgcgacttgttgaagcgatgcacttcgtcgacgaacaggatggtgcgcttaccatactgcccggcctgctgcttggcgacttccaccgcctggcggatctccttgaccccggcgagtaccgccgagaccgtttcgaagtgcgcatccgagacttttgctaagagccgcgccagggtggtcttgcccacccccggcggcccccagaaaatcatcgagtgcagcgcgccctgctccagggcttcacgcaggggcttgccgcgagcgagcaggtgttcctgaccgacgtactcatccaggttggtcgaacgcaggcgtgcggccaatggctgggcaatcgggtcacttcgaaacagatccatgggcagcgtttgaaacctctggggaatttattcctggatcacgtcggcacccttggggatgtcgaacttgaacttggacgccggtaccggctggttggccttgaccccggagaacaggatatcggtgcgctggccgacactgtcgatcaggcgcatgttgttgatcacgccgttaccgaacgacaaggacagggtgtcgaacagcgtgtccttggatttcggcttgagggtgaactcgatcacgttgctggtctgcttggaggtaatgtcgaagctgtcattgatcttcgacacgtcacccgagagcaacagcgccggagtctggttcaggcgcgggtcgagcttcttgatggtcgcctgttccaggtccgggtcccacagggtgaccttctggccatcggacacgatggtctgctcagccttgccttcggtgtgccaatagaacaggccaggacgctgcacggccatttcgccagcggtttcctgcaactgggtgcctccggcatccaaggtcaactgggaaaagcgcgcggtcagggtctgggatttgtcgagcaggttcttcaggctggcgacggaggccgggtcagcgtgagccgaaacagcggtcagggccagtgccggcaacaacagcatgcggataaagcgcatgggagtcctcattgagtagtcagggcgcgccgcgtgctgtcacgcggcgcgggatcagtcgcgcatctgcccgggggcaatgacttcgcgcgagccgttggtgttcattgcggtcacgacgccagcgttttccatggcttcgatcatacgagcggcacggttgtagccgattttcagcttgcgttgcaccgcggaaatcgaggctcgacggctttcgagcacgaacgccacggcttcatcgtacagcgcatcggtctcggcatcatcgtcgccaccgccgctgccgccatcgaagccgctgccggcttcttccacaccggcgaggatgtcatcgttgtactccggtgcgccgcgcagtttccaggcttccaccacacgatgcacttcatcgtcggaaacaaaggcgccgtgcacgcggatcggcaggctggtgcccggcggcatgtagagcatgtcgccgtggcctagcagttgttcggcgccgccctggtcgatgatggtccgcgagtcgatcttgctcgacacctggaacgccatgcgcgtcgggatgttggccttgatcaggccggtgatcacgtccaccgacggccgctgggtggcaaggatcaagtgaataccggcggcacgggccttctgggcgatacgcgcgatcagctcttcaaccttcttgccgacaatcatcatcatgtcggcgaattcgtcgaccaccaccacaatggtcggcagcttggtcagctttggcgcttcgtcgtgaatgctttcgcgccggtacaacggatcatcgatggtctcgccgcgctcgtgggcttccttgatcttggcgttgaagcccgacaggttacgcacgcccatcttcgccatcagcttgtagcggcgctccatctcggcaacgctccagcgcagggcgttggcggcgtccttcatgtcggtgaccaccgggcacagcaggtgcggaatgccttcgtagatcgacagttccaacatcttcgggtcgatcatgatcagcttggcgtcttccgggccggacttgaacaggatcgacaggatcatcgcgttcacccccaccgacttaccggaaccggtagtaccggccaccagcaggtgcggcatcttcgccaggtcggtgatcaccggcttgccgccgatgtcatggcccagggccagggtgaccggcgatttgaagttgtcgtactcgggcgtcgacagcacttcggagaagcgcacgatctggcggtcttcgttgggaatctcgatacccacggtggtcttgccgggaatcacttccaccacacgcacactggtcacggccagggaacgggccaggtctttcgccaggttggagatgcgactgaccttcacaccggcggccggctggatttcgtaacgggtgatcaccgggccgggatggatggagtccaccgacacttcgacaccaaactccttgagcttgatttccagcaggtggccgacggccgccagggattccggagaatagttgagttgtttcttttcggccgggtcgaggatcgagatcggcggcaaggtgccttcgacggcgctgtcgacgaacaacggtgcctgtttctctttctgtacgcgatggctcggttcggccggcttgggcggcgcgggggcaatcactggcggcacctgtttctcgcggtccgacatgtgcttgctcagggcctgctcgcgctcgatcaggcgttccttgacctttgcctgctcgcgccggtccggtgtgctcggcgccaccacttcgttgacacgggtgtccacctcacgcagctgggcaaccatgcgcttgcgctcgacacgggccgcccaccagcggttggcggcgccctggaacagctccagcaagtcgagggtgatcttgccggtcacgtccatcaccttgaaccatgacaggtcggtgaacacggtgaggccgaacaggaacagtgcgatgaacatcagggtgctgccctggatattcagggtccggcgcgccaggtcgccgaggctttcacccagcgcaccaccggcgcccgccggcaggccggtgggtgcatggaaatggatatgcgccagggccgcgccggacaacaccaggaacaccaggccgatcaggcgccaggaaaacagccatccgctccactgccacggctcgtggcgctggcggaagatctgccaggtcttgatcgccaacagcaacgggaagatataggcgaagtaacccagcaccatgaacaggatatctgcgctgtaggaaccggcaggcccaccgaagttctgcacgtcttcgatcttgctgttgtggctccagcccggatcgtccttgccataggtcagcaaggccatcatcaggaacaggcacagtgcgccgatggcgatcagcgcaccttccttgaggcgataatgcaggtgctgacgccaggccggcacgactgctgctttaggtgttgcggcggatttcttcaaaacgggtcttttcctgcgccttgagcgcgtccatctgttgaatgactgcaaatactgcccaatccgagcagctgaaaaatgaacgagcgtcgttgaatctactgtttaacaccgggcgattgctggatgaaatgacgataacgccacaatggccgcattgtacgggtttgtctccctgatgccacgccgcttggcgctcttccagcagcatagccaattgtgtgtcacaagatgttcaatttgagcatgcattgtctttgctgacaaaggcttatgagctgtttttaccaatccaggcaagcttggcaaatggcctgcatggaatagacccgattacgaccacgcccccggcatagagttgcagaaacacctgctcacgctaatcccccttaatgcctgattcgggctggcccgatggcgccaggtcgacaataatcagcactgccgccgcaggtgccatacctgccactcccctccccttccgcaaagcctggatgccatgctgacctggttacaacgcgattcaatgatcttccctgccttggccaaagccatgcgcgaacccaatggcctgctcgccgccggcggtgacctcagcgccgagcgactgatccaagcctatcgtcatggctgcttcccgtggttttccgagggccaaccgatcctgtggtggtcgcccgacccacgcaccgtgatattccccgacgaactgcatgtatcgcgcagcctgggcaaactgttgcgccaacagcgctacagcgtgaccttcgaccaggacttcgccgccatcatccaggcctgcgccgcacctcgcgcctatgccgatggcacctggatcaccgaaggcatccagagcgcctacctggaactgcaccagcgcggctacgcgcattcggttgaggtctgggacaagggtgaactggtaggcggcctgtatggcctcgcaatgggccggctgttttttggcgaatccatgttcagccgcgccgacaacgcctcgaaattcggctttgccacgctgacccgtcaattgcaggcctggggttttgtgctgatcgactgccagatgcccaacgaccacctgcacagcctgggtgcccgcgccatatcccgcaacgacttcgcagggttcctgcgcgaccatctggaccagcccaacgccggaccatgggtttcctaggcgacatcggcgctcctggcttacacttatttcaaagcttatccgagggttgatcatgaccgagttggcgcgtttgaagttttatgccactcaaccccactcttgcagctatctgcccgacgagcaggccaccacactgttcctcgaccccagccagcctatggacgtgcatgtgtatgccgacctgtcggagatgggctttcggcgcagtggcgaccatctgtaccggccgcattgccagaactgtaatgcctgcgtgcccgcacgcatccccgttgcgcagtttctgccggaccgcaaccagaaacgcatcctcaagcgcaacgccgacctgacggtgacatctgccaagccgcgcttcaccgaagaatatttcgacctttaccagcgctacatcgagcaacgccacgccgacggcgacatgttcccgcccagccgcgatcagttttccacctttctggtacgcgacctgcccttctcgcgcttctacgaatttcgtgcgaacggccgcctggtggccgtcgcggtgaccgatctgctgcccaatggcctgtcggcggtctacaccttctatgaacccgccgaagaacgccgcagcctcggacgcttcgcgatcctctggcaaattggcgaagccttgcgccaggaactggaggcggtgtacctcggctactggatcaagaactgcaaaaagatgaactacaagacccaatatcggcccatcgaactgctgattaatcaaagatgggtcgtgcttaactagaaccccttggcttaaacaccctttttcgggcacaatgcacgccgcttttgcctggcgcagttgcaccgggccattcactggataccgagggctttactgcatgtcgaaagaagacagcttcgaaatggaaggcactgtcgtcgacaccctgcccaacaccatgtttcgtgtggagttggaaaatgggcacgtcgtaaccgcgcatatctccggcaagatgcgcaagaactacattcgtattcttaccggtgacaaagtgcgcgtcgagctgacgccctatgacttgagcaaagggcgcatcacttaccgcgctcgctaagcaagtcaatacaaaacgcccggttatgccgggcgtttttgtgtgtgcgctatttaccaaacgccaaaaccaaatgtgggagggggcttgctcccgatagtggtagatcagtcactcatgtagcgactgaaacactgctatcgggggcaagccccctcccacattgacgcccaccgctatcgatcaggccatttcagccgtggtttcgaactcgaaggtcagctcgccgtccttcaggtcgatgtgcaccacgccaccatggtcggagagctcgccaaacaggatctcttcggccagtggccgcttgatcttgtcctggatcagacgcgccattgggcgtgcgcccattgccgcatcgtaaccgccttcggccagccaactgcgcgccgcgtccgtgacctccagctgcacgcgcttgtcttccaactgcgcctggagctcggtaaggaacttgtccaccacacttttgataacctcatggctgaggcgaccaaactggataatggtgtccaggcggttgcggaactccggcgtgaagctcttcttgatcacttccatggcatcagacgagtggtcctgatgcgtgaagccgatcgaagcccgcgcggccgtttcggcaccggcgttggtggtcatgatcacgatcacgttgcggaagtccgccttgcgcccgttgttgtcggtcagggtgccgtggtccatcacctgcaacagcaggttgaagacttcagggtgagccttctcgatttcatcgagcagcaatacacaatgcggttgcttggtaatcgcctcggtcaacaggccgccctgatcaaagccgacataacccggaggtgcgccgatcaggcgcgacacggtgtgacgctccatgtattcggacatgtcgaaccgcaccagctcgatacccatggccttggccaattggcgcgccgcttcggtcttgccgacgccggtcgggccggcgaacaggaacgaacccaccggcttgtctggcgacttgaggcccgcacgcgacagtttgatcgcagtggacagcgagtcgatggccgcgtcctgaccgaacacggtgagcttgaggtcacgctccaggttacgcagcagctccttgtcggaactggtgacgtgttttggcggaatccgcgcgatcttcgccacgatgtcctcgacctgcggcacgtcgatgcgcttcacacgcttctcgaccggctgcaggcgctgataggcgcccgcctcgtcgatcacgtcgatggccttgtccggcatgtgccgatcattgatgtagcgcgacgccagctcagcggccgaacgcagggcttcatcggtgtactcgatgccgtggtgcgcttcgaagcgccccttgagcccgcgcagaataccgatggtgtcttctaccgaaggctcggacacgtcgaccttctggaagcgacgtgccagggcacggtctttctcgaagatgccacggaattcctggaacgtggtcgagccgatgcagcggatatcacccgacgacagcagcggcttgagcaggttggaggcatccatcaccccaccggaggccgcaccggcaccaatgatggtgtggatttcgtcgatgaacaggatcgcctgcgggcgttttttcagctcacccagcagcgccttgaagcgcttctcgaagtcgccacggtacttggtcccggcgagcaaggcgcccagatcaagggagtagacgacgctgttggccagcaggtccggcacctggttgtccacgatgcgcttggccaggccttcggcaatcgcggttttacccacgcctgcctcgcctaccagcaacgggttgttcttgcgacgacgcgcgaggatctgcgctacacgctcaacctcaagctcacgccccaccagcggatcgatccgcccctggcgcgccagctcgttgaggttgctggcataggcatccagtggattgcccgaagaagaagactcaccgccctcgtcgtcctgcatatcctgctcaccctcggaatgatcgccgtgcccgggcaccttggagataccgtgggcgatgtagttgacgacatcgatacgggcaacgctctgctgtttaagcaggaacactgcctggctttcctgttcgctgaaaatcgccacaagcacattggcgcctgtgacttcacgcttaccggagctctgaacatggaacacggcacgctgaagcacccgctggaagcccagggttggctgggtctcacggtcttcatcgtggactggaataagtggcgttgtggagtcgataaactcctgcaggtcatgcttgagtttgtcgaggttggcgccgcacgcacgcaaaacggtggcggcagcttcgttatccaaaagtgccagcagcaggtgttcgacggtcatgaactcatgacgcttcgaacgagcctccttgaaggcaagattgagggtgacttcgagctcgcggtttaacatagcttcacctcatacccaagtggtcggcgttaaccgtccttctcgatttcacagagtagcggatgctggctttccctggcgtactggttgacctgcatggcctttgtctcggcgatgtcgcgggtaaacactccacatactgcccgtccttctgtgtgaacggccagcattaccttggtcgccaactcgcggttcaggttaaaaaacacctcgagtacttcgaccacgaaatccatcggtgtgtagtcatcattgaacaaaaccaccttgtacatcggcggcgcctgtagagcaggcttggcctcctgaacagcaatgcctgcagaaccgtcgtcatcatgttcctgatccggtcgatcctgattgaatgttagtcgaatctggctgtttgcatgcatggaaagaaaggttcgtcagtggttcaaatacagtggtgggggcgacctgtcagattttcaactactgaccgactggtcgccttgactatcggcgaaacggtgttacaaccaatagaacccacagtgggtaaaaaaggtccgcgcagtcaaccttatttattcgggttaggacggataaactggatgatactccagtgatggagtctggtgcagagggatatgggcatggcaagcggtaaggtcaagtggttcaacaatgccaaaggttacggcttcattaatgaagacggcaaggatgaagacctttttgcgcattactcagcgatccaaatggacgggtataaaacgctgaaagcggggcagccggtctcctttgacattattcaggggcccaaaggcaagcacgcagtcgcaatcagtgcgccagtcaccatcggcacagcaaaagacggcgtcgctcaaaaaccaaaagagcaactggcctgatcggccaccgagcaagcgcctaataaaaaaccggccattccgtttacggtatggccggtttttttattgccaatcgcttacatatgcgagatcagcgcatcaccaaagcccgacgacgacaccagcttcgcaccctccatcagacgctcgaagtcataagtcacggtcttggccgaaatcgcaccattggtgcccttgatgatcaagtcagccgcctcgacccagcccatgtgacgcaacatcatttccgccgacaaaatcaacgaacccgggttgacctggtccttgcccgcatacttgggcgcagtaccgtgggtcgcctcgaacatcgccacggtatccgacaggttggcgcccggcgcaataccaataccgcccacttccgccgccagggcatcagacaggtagtcgccgttcaggttgagggtcgcgatcacgtcatattcagccggacgcagcaggatctgctggagcatggcgtcggcaatcgcatccttgaccaccacgttcttgccggtcttcggattcttgaactgcatccaagggccgccgtcgagcagcgtggcgccaaattcttgcgccgccacctcataggcccattccttgaaggcaccttcggtgaacttcatgatgttgcctttgtgcacgatggtcagcgaatcgcggtcgttatccactacatattgcagggctttacgcgccaggcgctgggtgccctctttcgagaccggcttcacgccaatcccgcaatcctggtcgaaacggatcttggtcacgcccatttcttccttgaggaacttgatcaccttgatcgcttcgggcgaaccggccttccactcgatcccggcataaatgtcttcggagttttcccggaagatggtcatgtccacgtcgccgggcttcttgaccgggctgggcacgccttcgaaccagcgcaccgggcgcaggcacacatacaggtcgagttgttggcgcagggccacgttcagcgaacggatgccgccccccaccggggtggtcagcgggcctttgatggaaaccacgtaatccttgaccgcatccagggtttcctggggcagccaggtgtcctggtcgtagacttgagtcgctttctcgccggcaaaaacctccatccacgagatcttgcgcttgccgccgtaggccttttcaacagctgcgtcgactaccttgatcatcaccgggctgatgtcgacgccgataccgtcaccctcgatgtaggggatgatcggttggtcaggaacattgagagaatggtctgcattgacggtgattttgtcgccgactgccggaacctgaatcttcttgtatcccatgctgaactccatctatggattgaacatctggctgcgttcgagcctactccagataaatggcgactgaaacctcgcgccatgctcatttgcttcgaaaacagcataatttgtcgcctacaagcctgaaagaaaaggcaaaatcgccaatcttgagcacatcgtgcgactttggtcgcaatcgcgcacctgcgacctttagaccaatggacgacacaccttttgtatgaaggctcggcgtaagcatagcgacctatgtataatgccgccgctgaccaaagagtcacgacggcggaccgctctagaacacagccttccgctacaaagcaggactattacaatagtccacccgcttgacgctcgactgatgcaacccaacatcaccgcgaagaaacctcgacatttcgctcatggatgactttgaacgaacgcgctccacccggcgcatctcgagtttctgcgcacgctttcagcaaagaagagagttaatccgaatatgcccacccgctcgaagatcatctacaccttcaccgacgaagccccggccctcgccacctattcactgctgcctatcgtagaggccttcaccgcttccgctgatattgccgtggaaacccgcgacatctccctcgccgcgcgcatcctcgcaagcttccccgagcaactgggcgccaaggctatcccggaccacctcgccgaactgggcgacctggccgttacgcctgaagccaacatcatcaagctgcctaacatcagcgcctcgactccgcagctgcaagccgcgatcaaggaactgcaggcccagggctacgccctgccggactacccggaaaccgtaaccaccgacgcggaaaaagaaacccgtgcacgttacgacaaggtcaagggcagcgccgtgaacccggtactgcgcgaaggcaactccgaccgccgcgcaccgctgtcggtcaagaactacgcacgcaagcacccgcacaaaatgggcgcctgggctgccgactccaagtcgcacatcgcccacatgagcaacggcgacttctacggcagcgaaaaagccgtacagatcgaaggcgctgatgctgtcaaaatcgagctgatcgcccaggacggcaccgccaccgtcctgaaggaaaagacctcggtacaggcaggcgaaatcatcgacaccgccgtgctgagcaagaaggccctgcgcgcattcatcgccgctgagatcgaagacgccaagaaacaaggcgtgctgctgtcggttcacctgaaagccaccatgatgaaggtctccgacccgatcatgttcggccagatcgttgccgagttctataaagacgccctggccaagcacgccaccgtgctggaacagatcggcttcaacctgaacaacggtatcggcgacctgtacgcgcgcatcaaggccctgccggccgagcagcaagcacagatcgaagccgacatcgcagcggtctacgccgctcgccctgccctggcgatggtcaactccgacaaaggcatcaccaacctgcacgtgccgagcgacgtgatcgtcgacgcctcgatgccagccatgatccgtgactccggcaagatgtggggcaccgatggtcagctgcacgacaccaaggcggtgatcccggatcgctgctacgccaccatctaccaggctgtcatcgaagactgcaaagccaatggcgccttcgacccaaccaccatgggcagcgtgccgaacgttggcctgatggcgaagaaagccgaagagtacggctcccacgacaagaccttccagatcaaggctgacggcgtagtccgcgtcaccgacagcaagggcaacctgctgatggaacagaacgtcgaagccggcgacatcttccgcatgtgccagaccaaagacgcgccgatccaggactgggtcaaactggccgtcaaccgtgcccgcgccagcaacaccccggccatcttctggctggacccacagcgcgcacacgacggcgtcgtggtcgagaaggttcaggcttacctgaaagaccacaacaccgaaggcctggacatccgcatcatgtcgccggtcgacgcgatgaagttcaccctggagcgcacccgcaagggcctggacaccatctcggtgaccggcaacgtactgcgcgactacctgaccgacctgttccctatcatggaactgggcaccagcgccaagatgctgtcgatcgtgccgctgatgaacggcggtggcctgttcgaaaccggcgccggcggttcggcaccgaaacacgtgcagcaactggttgaagagaacttcctgcgctgggattccctgggcgagttcctggccctggccgcctcccttgagcatttgggtgtgacgtacaacaacccgaaagccctggtcctgtccaagaccctggaccaggccaccggccagttcctcgacaacaacaagtcgccatcgcgcaaagtcggcaacatcgacaaccgcggcagccacttctacctggcgctgtactgggctcaagccctggccgcccagaccgaagacactgcactgcaagcgcagttcggcgaactggccaagaccctgaccgcgaacgaggcaaccatcgttgccgagctcaacgccgtccagggcaagccagtggacatcggcggctactacgcgccgaacccggaactgaccagcaaggccatgcgcccaagcaacaccctcaatgcggcgattgccaagttgaagtaaggttgtaaggatgtaaagaagccccggccccgtgccggggtttctgtttaatgtgctttcttgctgaaaaaacccaatcaaactgtgggagggggcttgccccccgatagcagtaggtcaggcacagatagttcaactgacactccctcatcggggcaagccccctcccacactgactattatcctgtttcaggactgcaccgcatcttaaatccagaggcaaccatgacctggcaaccccacatcaccgtcgccaccatcgtcgaagacaacggcaagttcctgatggtcgaagagctcaagggcggccgcgccgtgctcaaccagcctgccggccacctcgacccagacgagaccctgaccgaggccgccgtacgcgagaccctcgaagaaaccggctgggacgtcgaagccatcggcatcgtcggcatctacctgtacaccgcccccagcaacggcgtgacctaccaacgggtctgcttcatcgccaaggccctgaaacaccacccggactatcaactcgacgaaggcatcctccgcgcccgctggctgagccgtgacgagctgatgagcgtgcgcgacgactggcgcagcgagctgatcatccgctgtatcgatgattatctggccggccactgccacagtctcgaattgatccgcccttctctttagccttgaaggcccgagcctgatagaatcgcgtcctttttcaagacacccgttgaaaccctatgcgtgatccagccccttctgacacacaaaagaagcgcgtcatcgtcggcatgtccggcggcgtggattcttccgtttccgccgttctgctcatggagcagggttatgaggtggaaggcctgttcatgaagaactgggaagaagacgatggaacggaatactgcaccgccatggacgacctggcggatgcccaggccgtgtgcgacaagattggcatcaagctgcacaccgccaacttcgccgccgagtactgggacaacgtgttcgagcacttcctggccgaatacaaggccggccgcacgccgaacccggacatcctgtgcaaccgagagatcaagttcaaggcgttcctcgactacgccatgatgctcggtgccgacctgattgccactggccactacgtgcgccgccgcgacatcgatggccgcaccgaactgctcaagggcctggacccgaacaaggaccagagctacttcctgcatgccgtcggcggcgaacagatcgccaagaccctgttcccggtaggcgagctggaaaaacccgaagtgcgcagaatcgccgagaaacacggcctggctaccgccaagaagaaggattccaccggcatctgctttatcggcgagcgccgcttcagcgacttcctcaagcaatacctgccggcgcaaccgggtgagatccataccaccgaaggcgaagtcatcggccgccaccatggcctgatgtaccacaccatcggccagcgccagggcctgggcatcggcggcttgaaagacgccggtgaagagccgtggtacgtgctggtcaaggacttggaaaacaacgtgctgatcgtcggccagggcaacgaacacccactgctgttctccggcgccctgctcgcctccgagatctactgggtcaacccgatcgacctgagcacgccacgccgcctcaccgccaaggtgcgctatcgccagagcgaccagccgtgcaccctggaaaaaaccgccaccggctaccgtgccacctttgatgacccgcaacgcgcggtcaccccaggccagtccgtggtgttctacgatggcgaaatctgcctgggcggcggcgtgattgaaatcgccgaagcctggagccacaaggcatgagcccgacccaggagcaattgacggcactgggcggggtgttcctcgccgcggtattggtggacaagatcgccaagaccggccaggtcaccgaagccggcctgacctgcatgctcggcagcctgctgatccgcgaccccaaggacactctggaagtctacggtggcgacgacctggcgctgcgtgaaggttaccgcgcactgatcggcgccctggagcgcgaccccagcaccctgcagcgcgagccgctgcgctatgccctgtcgatgctcggcctggagcgccaactggccaagcgcgaggacatgctggaggtcatcggcaaacgcctgccgcagatccagtctcaggtggaacacttcgggccggcccacgagaacgtaatcgccgcctgtggcgcgttgtaccaggacaccttgagcaccttgcgccagcgcatccaggtgcacggcgacatgcgcaacctgcaacaaccgaacaacgcctcgaaaatccgcgccctgctgctggccggtattcgttcggcgcggttgtggcgccagttgggcggccatcgttggcagctggtgatcagccgtcgcaaattgctcaaagagctttacccgttgatgcgcaacgaataagtcgcagcagcaggccattttcaagccgttacgcgtaatacgccggtcagttggcaacggaccggcggattttttcatgtatgatacgcgccccatttcgttgcccgactgtccgagaacaccccatgcagctctcttcgctcactgcggtttcccctgtagacggccgctacgccggcaaaacccaggccctgcgccctattttcagcgaatacggcctgatccgtgctcgtgtactggttgaagtgcgctggctccagcgcctggccgctcaccccgccatcagcgaagtgccggcgttttccgccgaagccaacgctgtgctcaacaccctggcggaaaacttctccctggagcacgccgagcgtgtgaaagagatcgagcgcaccaccaaccacgacgtcaaagccatcgaatacctgctcaaagagcaagcggccaagctgccggaactggcccaggtcagcgaattcatccactttgcctgcaccagcgaggacatcaacaacctgtcccacgccctgatgctgcgcgaaggccgtgatgacgtgatgctgccgctgatgcgccagaccgccaacgccatccgcgaactggcgatccgcttcgccaacgtgccgatgctgtcgcgcacccacggccagccggcgtcgccgaccaccctgggcaaagaactcgccaacgtggtgtaccgcctggagcgccagatcgctcaagtcgccgccgtaccgctgctgggcaagatcaacggcgccgtgggcaactacaacgcccacctgtcggcctaccctgagatcgattgggaagccaacgcccgtgccttcatcgaagatgagctgggcctgggcttcaacccgtacaccacgcagatcgaaccgcacgactatatcgccgagttgttcgacgccattgcgcgcttcaacaccatcctgatcgacttcgatcgcgatatctggggctacatctccctgggctatttcaagcagcgcaccattgccggtgaaatcggttcgtcgaccatgccgcacaaggtcaacccgatcgacttcgaaaactccgaaggcaacctcggcatcgctaacgccctgttccagcacctggccagcaagttgccgatctcccgctggcagcgcgacctgaccgactccaccgtactgcgcaacctcggcgtaggcttcgctcacagcgtgatcgcgtacgaggccagcctcaaaggcatcagcaagctggagcttaacgagcagaagatcgccgctgacctggacgcgtgctgggaagtcctggccgagccaatccagaccgtgatgcgccgctacaacatcgaaaacccatacgagaagctcaaagagttgacgcgcggcaagggcatcagccctgaagcgctgcagactttcatcgacggcctggacatgccagccgccgccaaggccgagctgaaactgctcaccccggccaactacatcggtaacgctgtagagcaagccaagcgcatctgatcatcgcaagaccctttgagacgcccggccgcgccgggcgtttttattccagtctgaaaagtgctttttttcaataggttacacatgaatcctgatatccctcttcaacttctgggcggcatcacggcacgggaattcctgcgcgactactggcagaaaaaaccgctgctgatccgccaggccattcctgatttcgaaagcccgatcgacgccgacgaactggccggcctggcgctggaagaagaagtcgagtcgcgcctggtgatcgagcacggcgagcgcccctgggaactgcgccgcggcccgttcgccgaagacgccttcagcaccctgcccgagcgcgagtggaccttgctggtgcaagccgtcgaccagttcgtaccggaagtggccgagctgctggagcagttccgcttcctgccgagctggcgcatcgacgatgtgatgatcagcttcgccgcaccgggcggcagcgttggcccgcacttcgacaactacgacgtgttcctgctgcaagcccagggcaagcgcaactggaagatcggccagatgtgcagctccgaaagcccgctgctgcagcacgccgacctgcgcatcctcgccgaattcgaagaaagcgccgagtgggtcctggaaccgggcgacatgctctacctgccaccacgcctggcgcatttcggcattgccgaagacgactgcatgacctattccgtgggcttccgtgcaccgagcgcggccgaagtgctgacccacttcaccgacttcctcagccagtacctgaccgacgaagagcgctacaccgacgctgacgcccagccggtcagcgacccgcaccagatccagagcgacgcgctggaccgcctcaagagcctgctggccgagcacatgagcgacgagcgcatgctgctgacctggttcggccagttcatgaccgaaccgcgctacccagaactggtagccggcgaagagttgggcgaagacgacttcatcagcagcctgcaagatggcgccatcctggtacgcaacccgagcgcgcgcctggcctggtccgaagtggacgacgatgtattgctgttcgccagtggccagagccgttacctgccaggcaaactgcgtgagctgctcaagctggtgtgctcggccgatgcgctgcacagcgagaacctgggcgaatggctggcggacgaagacggccgcgatctgctgtgcgaattggtcaagcaaggaagcctgggatttgccgatgaataggattcacgtaagtgtcgcggactggcaaaaggatatcgccgagattcggcgcattcgtgaagcggtgtttatcgctgaacaatcggttccaccggagctggagtgggacgcggacgacgccggcgcagtgcatttccttgcattcgaaggtaattttccgatcggcaccgctcgcctgctgcccagcggcgagatcgggcgcgtgtcggtactcaaggattggcgcgggcttaaagtcggcgacaagctgatggaagcggtgattggcgtggccgagcaacgcggccagaccaagcagttcctgagtgcgcaggtgtatgccgcgccgttctatgagcgactgggcttcaagatcgtcagcgacgaattcctggaagtcgggattccgcatgtggatatggtgcgcgagggctgattcgagaccgcgtcgctgccatcgggggcaagtcgaatcgtcgcaccgcccctcccacannnnnnnnnnnnnnnnnnnnnnnnnnnnnnnnnnntgtgggaggggcggtgcgacgattcgacttgcccccgatagccatttcagcaacaccaacaatgccctgccatgccagggcattttgccgtctaggattcaacttgcacccggccaggccgacaaactggcactatcaagcctaaatgactcgcagagataacggacatgtccctacgcaccctgctcaccgccctcctgttagccaccagcgtcacggccatggccgacaccgaagtggtcaacctgagcaaccgtaccagcgcagacctgctgcccgtggcgcagaacttcatcggcaaggacggcaccgtcagcgcttatggcaaccagctgatcgtgaaggccgaccccggcaagatccaggacctgcgcgccttgctgtctcagctggacactccggccaaacgcctgctgatcaccgtcgacaccaacgaaaacaaccagcagaacaccggtgacagccagacgcgcatcatcagctacggcaccaccagccgcgacggcggtacgcagcagatccaggccagcgaaggcgtgcctgcgctgatccaggtcggccagagcgtaccgctgaccaccacccagcaagatagctacggccgcctgcaaaatcagacccagtatcgcaacgtgacccagggcttctatgtgaccgcgagcgtcaccggcgagaccgtgcacctggcgatcagcaccaatcgtgaccgcatgagccaggagcgtcccgatgtagtgaacgtacagagtaccgacacaaccatcagtgggcgcctaggcgagtggatcaccctgtccggcatcaatcgcgagacccaggctgataaatcctctacaacccgcagctactctactcagggccgtgatgacctgacggtgcgggtcaaggtcgacaccctgaactgaagcaccaaaaactgactgatgagtcgtattagactaaagatgtagtgcttgaaaaaaagcactacaaaacatttgacgatccaaaaaagcctgggcatgatggcctcgctcccgctaatcaggggccctggcaagggccttcggatcgcgctccaagctacccacctgagccgattcgtgtctgtaccgcccacaaggcgtgtttgacgaggttgcgactggaacgaagttgtcccgagggacggaagctaaccaggtaacccggctacacgctgttgaacacccgagggcccacgacgcccgaagactgttctcggcccgcctgtacctgcccgaccctctcgccactcgttcatcccgtcgcattccccgccagacccgacatgaccgcctaagcttctggtcagcgagcagccctgcccacgcacttgaatgcagggctggcaaatggatttttccaccacacgaagacgcgacgaggtttacttccatggcactgacacgcgaacagcaaattgcagccctcgagaaagactgggctgaaaacccacgctggaaaggcgtgacccgcgcttattccgctgctgacgtcgtccgcctgcgtggctcggttcaacctgagcacacctttgcaaaactcggcgccgagaagctgtggaagctggttacccaaggggccaagccttccttccgtcccgacaaagatttcgtcaactgcatgggcgccctcactggcggccaggcagtccagcaggtgaaagccggtatccaggcgatctacctgtccggctggcaagtggcggcggacaacaactccgccgaatccatgtaccccgaccaatcgctgtacccggtggactcggtgccgaccgtggtcaagcgcatcaacaactcgttccgtcgcgccgaccagatccagtggaaagccggcaagaacccgggcgatgaaggctacatcgactacttcgcgccgatcgtggccgacgccgaagccggtttcggcggcgtactcaacgcctacgagctgatgaagagcatgatcgaggcaggcgctgccggcgtgcacttcgaagaccaactggcttccgtgaagaaatgcggccacatgggcggcaaggtcctggttccaacccaggaagctgtacagaagctgaccgctgcccgcctggccgctgacgttgccggcacgccaaccatcatcctggcgcgtaccgatgccaacgcggctgacttgctgacttcggactgcgacccgtatgaccagcccttcgtgactggcgagcgcacccaggaaggcttctacaaggtacgtgccggtctcgaccaggccatcgcccgcggcctggcctacgcgccgtacgccgacctgatctggtgtgaaaccgccaagccggacctggacgaagcccgtcgtttcgccgaggcgatcaagaaggaatacccggaccaactgctgtcctacaactgctcgccgtccttcaactggaagaagaacctggacgacgcgaccatcgccaagttccagcgcgaactgtccgccatgggctacaagcaccagttcatcaccctggccggcatccacaacatgtggcacagcatgttcaatctggcgcacgactacgcccgcaacgacatgaccgcctacgtgaagctgcaggagcaggagttcgctgacgccgccaagggttacaccttcgtggctcaccagcaggaagtgggcaccggctacttcgacgacatgaccaccgtgatccagggcggcacctcgtccgtgaccgcgctgaccggctcgaccgaagaagagcaattccactgatcgactgagtacacggccactgcggccccaaggaagacctaaccgcagtgccgcacaaagatcacgccccgacctgttcggggcgttttttttgccccgtgaaaaacctccctgtcaaaatgaagatcaacctgtgggagggggcttgcccccgatggcggcgggtcaatcacagacgtatcaactgacatcccgtcatcgggggcaagccccctcccacactggaaatgccgacgcggctctggattttgtgcaaaacattgatccagagcggtattggcacgaataaaatcggttaaaagatccccgtcggcaactaagcggtattcaaccaagtaacagcaacttccctcgccccaccacacacacccgcttaaaatccgcgcaaacaatattcattatcatttagcgcatgaaaacttcgttaccggttaaacaaaacacatttgattaaatgcccgctaatgcccgccacataagggctgcagccccaagaaggtgcactatgtgcttattccaccgaataatttcgccataggaattttacttgcccggtgtttagccataaaatcaccgcgattgattgcagtgcgacatatcgtcactgcatcgttactttttcgagctcagagacctttgctctctgttaaggatttccagcatgaccgaagcgacaggactcatggcccacaactggggctttgccattttcctcctcggtgttgtcggcctctgcgccttcatgctcggtgtttccagcctcctcgggtcaaaagcctggggccgcagcaaaaatgaaccgttcgagtccggcatgctgcctacaggtggcgcccgcttgcggctctcagccaaattctatctggtcgcgatgctgttcgtgatcttcgatatcgaagccctctttctctttgcctggtctgtgtccgtccgcgaaagcggctggaccggattcgtcgaagccctcgttttcatagcaattctgttggcaggccttgtctacctattccgagtgggcgcccttgactgggctccggaagctcgtcgtaagcggcaagcgaagctgaaacaatgaggctttggcgatgcaatacaatctcaccaggatcgacccggatgctcctaacgagcagtaccccatcggcgaacgggaaaccgtttccgacccgttagaagaccaagtccacaaaaacatctacatgggcaagctggaagacgtgctgagtggcgcggtcaactgggggcgtaaaaactccctgtggccgtacaacttcggtctttcgtgctgctacgtggaaatgaccaccgccttcacggcgccccacgacatcgcgcgctttggcgccgaagttatccgggcctcgccgcgccaggcggatttcatggttatcgccggtacctgcttcatcaagatggcgccgatcatccagcgtctctacgagcaaatgctcgagccgaagtgggttatctccatgggttcgtgcgccaactccggtggcatgtacgacatctattccgtcgttcaaggggtggacaagttcctgcccgtggacgtctacgtgcctggctgcccgcctcgccctgaagcgttcctgcaaggcttgatgctgttgcaggaatcgatcggcaaggagcgtcgtccgctttcctgggtcgtcggtgatcaaggcgtgtaccgcgccgagatgccgtcgcaaaaggaacagcgccgcgaacagcgaatcgcagtcacaaacctgcgcagccccgacgaagtctgatccagcaccgcttcttttatagaacgaacacctggcttcattctttacgttgaccgaaagcgataaaaaaccatgactacaggcagtgctctgtacatcccgccttataaggcagacgaccaggatgtggtcgtcgaactcaataaccgttttggccctgacgcctttaccgcccaggccacgcgcaccggtatgccggtgctgtgggtggcgcgtgccaagctcgtcgaagtcctgaccttcctgcgcaacctgcccaagccgtacgtcatgctctatgacctgcatggcgtggacgagcgtctgcgcaccaagcgccaggggctgccgagcggcgccgatttcaccgtgttctaccacctgatgtcgctggaacgtaacagcgacgtgatgatcaaggtcgcactaaacgaaagcgacttgagcatcccgaccgtcaccggtatctggccgaacgccagctggtacgagcgcgaagtctgggacatgttcggcatcgacttcccgggccacccgcacctgacgcgcatcatgatgccgccgacctgggaaggtcacccgctgcgcaaggacttcccggcgcgcgctaccgaattcgacccgttcagcctcaacctcgccaagcagcagcttgaagaagaggctgcgcgcttccgtccggaagactggggcatgaagcgctccggcaccaacgaggactacatgttcctcaacctgggcccgaaccacccttcggcccacggtgccttccgtatcatcctgcaactggacggcgaagaaatcgtcgactgcgtgccggacatcggctaccaccaccggggcgccgagaagatggccgagcgccagtcgtggcacagcttcatcccgtacaccgaccgtatcgactacctcggcggcgtgatgaacaacctgccgtacgtgctctcggtcgagaagctggccggtatcaaggtgccggatcgcgtcgacaccatccgcatcatgatggccgagttcttccggatcaccagccacctgctgttcctgggtacctatatccaggacgtcggcgccatgaccccggtgttctttaccttcaccgaccgtcagcgtgcctacaaggtcatcgaagccatcaccggtttccgcctgcacccggcctggtaccgcatcggcggcgtggcccacgacctgccgaatggctgggaacgcctggtcaaggaattcatcgactggatgcccaagcgtctggacgagtaccaaaaggcggcgctggataacagcatcctcaagggtcgtaccatcggcgtcgcgcagtacaacaccaaggaagccctggaatggggcgtcaccggtgccggcctgcgttccaccggctgcgatttcgacctgcgtaaagcgcgcccgtactccggctacgagaacttcgagttcgaagtgccgctggcggccaatggcgatgcctacgaccgctgcatcgtgcgcgtcgaagaaatgcgccagagcctgaagatcatcgagcaatgcatgcgcaacatgccggccggcccgtacaaggcggatcacccgctgaccacgccgccgccgaaagagcgcacgctgcagcacatcgaaaccctgatcacgcacttcctgcaggtttcgtggggtccggtaatgccggccaacgagtccttccagatgatcgaagcgaccaagggtatcaacagttattacctgacgagcgatggcggcaccatgagctaccgcacccggattcgtaccccaagctttgcccacttgcagcagatcccttcggtgatcaaaggcgagatggtcgcggacttgattgcgtacctgggtagtatcgatttcgttatggccgacgtggaccgctaagcatgaacagcacgcttatccagacagaccgtttcaccttgagtgaaaccgagcgctcggccatcgagcacgagctgcatcactacgaagacccgcgcgcggcgtcgatcgaagccttgaagatcgtccagaaagaacgtggctgggtgccggacggcgccctctacgccatcggcgagatcctcggcatccccgccagcgacgttgaaggggtggccacgttctacagccagatcttccgtcagccggtgggccgccacatcattcgcgtgtgcgacagcatggtctgctacatcggcggccacgaatccgtggtcagcgagatccagaacaagctgggcatcggcctcggccagaccactccggacggccgcttcacgctgctgccggtgtgctgcctgggcaactgcgacaaggcgccggcgttgatgatcgacgacgacacattcggtgacgtgcagcctgctggcgtgacccaattgctcgagggctacccatgaccctgacttctttcggcccggccaacctgatcaagcgttcgcccgagacccacccgctgacctggcgcctgcgtgacgatgccgagccggtatggctcgacgaataccaggccaagaacggttacgccgctgcgcgcaaagccttcgccgacatggcccaggacgatatcgtccagaccgtgaaagacgccggcctcaagggccgcggcggtgcaggcttccccacgggcgtgaagtggggcctgatgcccaaggacgaatccatcaacatccgctacctgctgtgcaacgcggatgaaatggagccgaacacctggaaagaccgcatgctgatggagcaactgccccatctgctgatcgaaggcatgctgatcagcgcccgcgcgctgaaaacctaccggggctacatcttcctgcgtggcgaatacaccaccgccgccaagcacctcaaccgtgccgtggaagaagccaaggccgccggcctgttgggcaagaacatcctcggttcgggttttgacttcgaactgttcgtgcacaccggcgccgggcgctacatctgcggtgaagaaaccgcactgatcaactccctcgaaggccgccgcgccaacccgcgctccaagccgcccttccctgccgccgtaggcgtgtggggcaagccgacctgcgtgaacaacgtcgagaccctgtgcaacgtgccggcgatcatcgccgacggcgtggactggtacaaatcgttggcccgcgaaggcagcgaagacatgggcaccaagctcatgggcttctccggcaaggtcaagaacccgggcctgtgggagctgccgttcggcgtgaccgcacgcgagctgttcgaggactacgccggcggcatgcgcgacggctacaccttgaaagcctggcagccaggcggcgccggtaccggtttcctgttgcccgagcacctcgacgcacaaatgtatgccggcggcatcggcaaggtgggcacccggatgggtaccggcctggcgatggcggtcgacaacaccgtgaacatggtgtccttgctgcgcaacatggagcagttctttgcccgcgagtcctgcggcttctgcaccccatgccgcgacggtctgccatggagcgtgaagctgctgatggccctggaaaacggcgaaggccgcgagggtgacatcgagaccctgctgggtctggtcggtttcctcggcccaggcaagaccttctgtgctcacgcaccgggcgccgtggaaccattgggcagcgcaatcaaatacttccgctcggagttcgaagccggcatcgcgcctaccagtgccgccgtcccgcctctggcgaggccgatcgtagtcggcgcgtaacgctttaacaggtgaagggtccgtgcccttcacctgctcatgggctgacgccgtaaaggctgtgttgacgcccatgaataacaagattccattagccacgcccgctgacaacgggccaacgaagaactttgaaccatggccactatccacgtagacggcaaagcgctcgaagtcgatggggcagacaacctgttacaggcatgtctctcactaggcctcgacatcccatatttctgctggcatcccgcgcttggtagcgtcggggcctgtcgccagtgtgcggtcaagcaatacaccgacgagaacgacacccgtggtcgtatcgtcatgtcctgcatgaccccagccaccgacaacacctggatctccatcgacgatgaagaatccaaggcgttccgcgccagcgttgtcgaatggctgatgaccaaccacccccacgactgcccggtctgtgaggaaggcggtcactgccacctgcaagacatgacggtgatgaccggccacaacgagcgccgttatcgcttcaccaagcgtacccaccagaaccaggacctcggcccgttcatttcccacgaaatgaaccgctgcatcgcctgctatcgctgcgtacgcttctacaaggactacgccggcggcaccgacctgggcgtattcggcgcccacgacaacgtgtacttcggtcgcgttgaagacggcgtgctcgaaagcgagttctccggcaacctcaccgaggtctgcccgaccggtgtattcaccgacaagacccactccgagcgctacaaccgcaaatgggacatgcagttcgccccgagcatctgccatggctgctccagcggttgcaacatctccccgggcgagcgctacggcgaactgcgtcgcatcgaaaaccgcttcaacggttcggtcaaccagtacttcctgtgcgaccgtggccgtttcggctatggctacgtcaaccgcgaagaccgcccacgccaaccactgttggccgacggcgccaagctgagcctggacgacgcgctggataaagccgccgacctgctgcgcggccgcaacatcgtcggtatcggctcgccgcgcgccagcctcgaaagcaacttcgcgctgcgcgagctggtcggtgccgagcacttctactccggtatcgaagccgctgagctggagcgcatccgcctggtcctgcaggtgctgaacgacagcccgctgcccgtaccgaacatgcgcgacattgaagaccacgacgcgatcttcgtgctcggtgaagacctgacccagaccgccgcccgcatcgccctgtcgctgcgccagtcggtcaagggcaaggccgaagacatggccgacgccatgcgcgtccagccctggctcgacgccgcggtgaaaaacatcggccagcacgcgctgaacccgttgtttatcgcgagcatcgctgaaacaaagctcgacgacatcgccgaagaatgtgtacacgcagcgccggacgacctggcgcgcctcggtttcgccgtggcccacgccctggacgcaagcgcgcctgccgtcgacggcctggacaccgaagccgtcgaactggcccagcgcattgccgacgccctgctggcggccaaacgcccattgatcattgccggcacctcgctgggttccaaggcgctgatcgaagccgccgccaacatcgccaaggccttgaagctgcgcgacaagaacggttccatcagcctggtggtgccagaggccaacagcctcggcctggccatgctcggtggcgagtccctggacgctgccctgcaagcggtgaccgacggcaaagccgacgccatcgtggtgctggaaaacgacctgtacacccgcaccgatgccgccaaggttgacgctgcactgaacgcggccaaagtgctgatcgtcgccgatcaccagaagaccgccaccagcgaccgtgcccacctggtactgccggccgccaccttcgccgaaggcgacggcaccctggtcagccaggaaggccgcgcccagcgcttcttccaggtgttcgatccgaagtacatggatgccagcatcctggttcacgaaggctggcgttggctgcatgccctgcgcgccaccctgctgaaccagccgatcgactggacccaactcgaccacgtcaccgcagccaccgctgccagcgccccgcaactggcgcggattgtcgacgctgcaccgtccgcctcgttccgcatcaagggcatgaaactggcccgtgaaccgctgcgttactccggtcgtaccgccatgcgcgccgacatcagcgtgcatgaaccgcgtaccccgcaagacaacgacaccgcgttcgccttctccatggaaggttactcgggttcggtcgaaccgcgtcagcaggtgccgttcgcctggtcgccgggctggaactcgccgcaggcctggaacaagttccaggacgaagtcggtggtcacatccgcgctggcgacccgggcacccgcctgatcgaaagcaccggtgatgcgctgaactggttcgccgccgtaccgcgtccgttcaacccggcccagggcacctggcaggtcgtgccgttcttccacttgttcggcagtgaagagaactcctccaaggccgcgccggtgcaaagtcgcattcctgaggcctacgtatccgtggccaagtccgaagccgaccgcctgggcgtcaacgaaggtgccttgctcagcctgaacgtggccggccagaccctgcgtctgccgctgcgcatcaacgacgagttgggtgccgggctggttgcactgcctaaaggcctcgccggtatcccgccggcgatctttggcaaaaccgttgacggtctgcaggaggcagcgcaatgacctggttcacccctgaagtgatcgacgtgatcatctcggtcgtcaaggccatcgtgatcctgttggccgtggtcgtcgcgggcgccctgctcagcttcgtcgaacgtcgcctgctgggctggtggcaggaccgctacggtccgaaccgcgttggcccgttcggcatgttccagatcgccgccgacatgctgaaaatgttcttcaaggaagactggaccccgccgtttgccgacaaggtgatcttcaccctggcaccggtcgtggccatgagcgccttgctgatcgccttcgcgatcatcccgatcaccccgacctggggcgtggcggacctgaacatcggcttgctgttcttcttcgccatggccggtctgtcggtctatgcggtgctgttcgccggctggtcgagcaacaacaagttcgccctgctgggcagcttgcgggcttcggcccagaccgtgtcctacgaagtgttcatgggcctcgcgctgatgggcatcgtggtgcaggtcggctcgttcaacatgcgcgacatcgtcgagtaccaggcgcagaacctgtggttcatcattccgcagttcttcggcttctgtaccttcttcatcgctggcgtggccgtgactcaccgtcacccgttcgaccagccggaagcggaacaggaactggccgacggttaccacatcgaatacgccggcatgaagtggggcatgttcttcgtcggtgaatacatcggcatcatcttgatctcggccctgctggtcacgctgttcttcggcggctggcacggaccgttcggcatcctgccgcagttggcgttcttctggttcttcctgaagaccgcgttcttcatcatgttgtttatcctgctgcgcgcttccattccgcgtccacgatatgaccaggtgatggatttcagctggcgcttctgcctgccgctgaccctgatcaatttgctggtgactgctgccgtggtgctgatgcacgcgccagcggctgcggttcagtgaggatttgacccatgttcaaatatattggcgacatcgttaagggtaccggtacccagttgcgaagcctggtgatggttttcggccatggctttcgcaaacgcgacaccctgcaatacccggaagaagcggtgtacctgccgccgcgctatcgcggccgcatcgtactgacccgcgaccccgacggcgaagagcgttgcgtagcctgcaacctgtgcgccgtggcgtgcccggtgggttgcatctccctgcagaaagctgaaaccgaagacggtcgctggtacccggacttcttccgcatcaacttctcgcgctgcattttctgcggcctctgcgaggaagcttgcccgaccaccgcaatccagctcacgccggatttcgagatggccgagttcaaacgtcaggacctggtgtacgagaaagaagatctgctgatctctggtcccggtaaaaaccctgattacaacttctatcgtgttgcaggtatggccgttgccggtaagccgaaaggcgccgcacaaaacgaagccgagccgatcaacgtgaagagcttgctgccttaaggaagaaagatggaattcgctttctatttcgcatcgggtatcgcggttgtgtccacgcttcgcgtgatcaccaacaccaaccctgtgcacgccctgctctacctgatcatttcgctgatcgccgtggccatgaccttcttcagcctcggcgcgccgttcgccggtgtactggaagtgatcgcctacgccggcgccatcatggtgctgttcgtgtttgtggtgatgatgctcaacctggggccggcttcggtcgcccaggaacgcgtctggctcaagcccggcatctggctcggcccggttgtcctggcagcgctgctgctgggtgaactgctgtatgtgctgttcgctcaccagagcggccaggccatcggccacaccaccgtggatgcaaaagccgtgggcatcagcctgttcggcccgtacctgctggtggtcgaactggcgtcgatgctgctgctcgctgcagccgtcaccgccttccacttgggccgcaacgaagccaaggagcaatgacgatgcctgctatccctttggagcatggtctggcggtcgccggcatcctgttctgccttggcctggtcggcctgatggtccgccgtaacattctgttcgtgttgatgagcctggaaatcatgatgaacgccgcggcactggcgttcatcgttgcgggtgcacgttggggccagccagatggacaagtgatgttcatcctggtgatcagcctggcagccgccgaggccagtattggcctggcgatcctgctgcaactgtatcgtcgcttccacacgcttgatatcgacgctgccagtgagatgcgcggatgaacatgatctttctgactttcgtattccccctgatcggtttcctgctgctgtcgttctcccgtggacgctggtcggaaaacctctcggccctggtgggcgtgggttccattggcctgtcggcgatcgtcgccgcctacgtcatctggcaattcaacgtggcgccgccggaaggcggtcactacaccctggtgctgtggcagtggatgtcggtggagggcttcaagcccaacttcgccctctacgtcgacggcctgtcgatcaccatgctcggcgtggtcgtcggcgtgggcttcctgatccacctgttcgcgtcctggtacatgcgcggtgaagccggctactcgcgcttcttctcgtacaccaacctgtttatcgccagcatgctgttcctggtgctcggcgataacctgttgttcctgtacttcggctgggaaggcgtgggcctgtgctcgtacctgttgatcggtttctactacagcaaccgcaacaacggtaacgcagccctcaaggcgtttatcgtcacccgcatcggcgacgtgttcatggccatcggcctgttcatcctgttccagcaagtgggcacgctgaacatccaggaactgctggtgctggcaccgcagaaattccaggtcggtgacttctggatcaccctggctaccctgatgctgctgggcggcgccgtgggtaaatccgcgcaactgccactgcaaacctggctggcagacgcgatggctggccctaccccggtttccgcactgatccacgcggccaccatggtcaccgccggtgtctacctgatcgcccgtacccacggcctgttcaccctggcgccggacatcctgcatctggtcggcatcgtgggtggcgtgaccctggtcctggccggcttcgctgccctggtgcagaccgacatcaagcgcatcctcgcctactcgaccatgagccagatcggctacatgttcctggccctgggcgttggcgcctgggacgcggcgatcttccacctgatgacccacgccttcttcaaggccctgctgttcctcgcgtccggtgcggtgatcgttgcctgccaccacgagcagaacatcttcaagatgggcggcctgtggaagaaactgccactggcctacgccagcttcatcgtcggtggtgccgccctggccgccctgccgctggtgaccgccggtttctactcgaaggacgaaatcctctgggaagccttcgccagcggtaaccagaacctgctgtacgcaggcctggtgggtgcgttcatgacctcgctgtacaccttccgcctgatcttcatcaccttccacggtgaagccaagactgaagctcacgcaggtcacggcatctcgcactggttgccattgtcggtactgatcatcctgtcgaccttcgtcggcgccatgatcactccgccgctgcacggtgttctgccgcaaagcgtcgggcatgccggcggcgcagcccagcacagcctggaaatcgcctcgggtgccatcgccatcgccggtatcctgctggcggccctgctgttcctcggcaagcgtcgcttcgtgacagccgtcgccaacagtggcattggccgcttcctgtcggcctggtggttcgctgcctggggcttcgactggatctacgacaaactgttcgtcaagccttacctcgccatcagccacatgctgcgcaaggacccgctcgaccagaccatcggtctgatcccgcgtgccgccaaggccggtcacaccgccctgagccgcagcgagaccgggcaactgcgttggtatgcagcctccatggctgccggtgctgtgctggtgatcggcgccatcgttgtggtagcggtctgactatgaatattgcgaacctgcgaaaggaaacgagcctgtcatgattctgccctggctaatcctgatcccctttatcggcggcctgctctgctggatgggtgaacgcttcggcgccaccctcccccgctggattgcgttgctgaccatgtccctggaactcgcgctcggcctctggctgtgggcccatggcgactattcatttgctccggcaccgggtgtcgatcccaccttcgcgcttgaattcaagcacgtgtggatccagcgcttcggcatcaacgtgcacctggccctcgacggcctgtcgctgttgatgatcctgctgaccggcctgctgggtatcctctcggtactctgctcctggaaagagatccagcgtcacgtgggcttcttccacctgaacctgatgtggatcctgggcggtgtcgtcggcgtgttcctcgccctcgacctgttcatgttcttcttcttctgggaaatgatgctggtgccgatgtacttcctcatcgcgctctggggtcacagttcttcggacggcaagaaaacccggatctacgcggcgaccaagttcttcatcttcacccaggcttccggcctgatcatgttggtggcgatcctggggctggtgctggtcaacttcaacaacaccggcgtgattaccttcaactacgccgacctgttgaagaccaagatgtccctgaccaccgagtacatcctgatgctgggcttcttcatcgccttcgcggtgaagctgccggtggtgccgttccactcctggctgcccgacgctcacgcccaggcgccgaccgccggctccgtggacctggccggtatcctgctgaagacggcggcctacggcctgctgcgtttcgccctgccgctgttcccgaatgcctcggccgagttcgcgccgatcgccatgaccctgggtctgatcgggatcttctacggtgcgttcctggccttcgcccaaaccgacatcaagcgtctgattgccttctcgtccgtttcccacatgggcttcgtactgatcggcatctactccggcagccaactggcgctgcaaggcgcggtgatccagatgttggcccacggtgtctcagccgcggcactgtttatcctgagtggccagctgtacgagcgcctgcacacccgtgacatgcgtgaaatgggtggcgtatggtcgcgcatcgcctacctgccggcgatcagcctgttcttcgccgccgcgtccctgggcttgccgggcaccggcaacttcatcggcgagttcctgatcctgatgggtgccttcgtgcaaacgccgtggatcagtgcgattgctacctccggcctggtgttcggttcggtctactcgctgatcatgatccaccgcgcctacttcggcccggccaagtccgacaccgtcctgcaagggatggacgctcgcgaactgatcatggtgctcggcctggcggtactgctgatctacatcggcgtgtacccgcaaccgttcctggacacttctgccgcaacgatgcatggcgtgcagcagtggttcggcaccgccttctctcaactcgcttcggcccggtaagagcgctatggaattcacgatccaacactttatcgcgcttgcgccgctgctgatcaccagcctcaccatcgtggtggtgatgctggcgatcgcctggcgccgcaatcactcgcaaacgttcctgctgtcctgtgccggcctgaacctggccctgctgtcgatcatcccggccctcaaggtcgcgccactggcggtcacgccattgatgatggtcgatgacttcgcgctgctgtacatcgcgctgatcctggtcgcgaccctggcctgcgtcaccctcgcccacgcctacatgggcgaaggcggcaccggttacccaggcaacaaggaagagctgtacctgctgatcctgctggctgcggccggtggcatcgtgctggtcagcgcacagcacctggccggcttgttcatcggcctggaactgctgtcgatcccgacctatggcctggtggcctatgccttcttcaacaagcgctccctggaagccggcatcaagtacatggtgttgtcggccgccggttccgcgttcctgttgttcggtatggccctgctctacgccgaagccggcagcctgagcttcaccggtatcggccacgccctggccaccaccagcctgcctgcgccaatcgcccaactgggcctggccatgatgctgatcggcctggcgttcaagctgtcgctggtgccgttccacctgtggaccccggacgtgtacgaaggcgccccggcgccggtggctgcgttcctggcgaccgcgtcgaaggttgcggtgtttgcggtgatggtgcgtctgttccagatctcgcctgctgccaacactggcgtgctgagcaacgtgctgaccgtgatcgccatcgcgtcgatcctgttcggtaacctgctggcgctgacccagaacaacctcaagcgtctgctgggttactcctccatcgcccacttcggctacctgctgatcgccctggtggcgagcaaaggcctggccgtggaagccatgggcgtgtacctggtcacctacgtgatcaccagcctcggcgcgttcggcgtgatcacgctgatgtcctcgccgttcaaaggccgtgacgccgacgccctgtacgagtaccgcggcctgttctggcgccgtccgtacctgaccgccgtactcaccgtgatgatgctgtccctggccggtatcccgctgactgccggcttcatcggcaagttctacatcgtcgcgaccggtgttgaagcacacgagtggtggttggttgcctccctggtactgggcagcgccatcggcgtgttctactacctgcgcgtgatggtcaccctgtacctgatcgagccgaacctgcgccgtgtggatgccgagctgcattgggaacagaaggcaggcggcgtgatgctgctggccatcgccctgctcgcgttcttcctgggcgtgtacccacaaccgttgctgaccctggtgcagcacgcggtattgggcgtttgatcgcttagcgagatgcagtcaacagaacggcgccttcgggcgccgttttgcgtttcaggggcaggggtttttaccctcccctattcacggaaatttcctcacccgcctgcctccccttccggcatctacccgatgaaggccgccgtatggtgtctgcgttttaggaaagttcccacattagggtcacttgaccctttgcgagtgggccaccaaactctacgtaggctacgtacagaacatggatgctctatttatcgaactgccggccttcgagcggcatcgcaaggactatctgagtgacgagcttttccagggttttcaacaagagttgatgaagaacccggaagcaggagatgtgatcgagggaacaggcggactgcgcaaagttcgcttcatcgatgagcgacgcaacaaaggcaagcgcggtggcctgcgggtcatttactactggtggtcgggcggcacgcaattctggctgttcaccctgtacggcaagcacgaacaggatgacctgacaccacagcacaaaaaagccctaaaacacatgctggacagggaaatcaaagcgagaacacatcatgaaacgtgaaatcttttccgaactggtcgaaggcttcgacgccctggcagacgaacgccaaggcaaagtcaccctgcgaacccataaggttcatctcaatcaactggagccgcttaccgccgaggaggtggtggccgtgcgccagcaactcaacctctcccggtcggtgttcgccatgtacctgcgcaccaacacccgtaccctggaaaactgggaacaaggtcgggccaagccaaatgcccaggctgccacgctgattcgcctggtggcacgttttcctgagaccgtggcgcaacttgccgctttgggttgatctgcaattacctcaaaaaaaacgccccggacattgggggcgtttttcggtgcatcgcgtcagaaagcgataccgaccttgaagccgtactcgttacgcttgagcttggtgttgtcagccacttcggagtcaccgtcgagcttgtactcggtgcgggtgtagtacaggcccgcgactaccggcaggtcacccttctgattcatcagcaagctgacttcggcgtaggggttggtgcggtccttgaggtcgacggtgtcgctgccgaaatcatccaccttgagcttggtgcggccatcaatggtacgacgggcaccggcttcgacacgcagggtcatgtcatcgaactggtggttgtagcccagagccgccttggcgaacggcgatttgttggtgagcttcacatcgaggtcgttgatctctggctcgtagcgggtccagctgtagccgccaccgacgatcacgtcgacaaaattgcgcgcatccagcgcggcacgccagccgagatccaggtcagcctggccttccttgagtttgttgtcgctcttttcaccgtacttggcttcgataccggcctggtagataaagccggattcggcggtgagcttgttgccgaagttgtagaacaggccggcctcaggcatgtggctcttgtcgctctcgctgccgccttcgaatttgaagtcgttgtagctgcccaggatcccgaaggtggaaatcgggtcggtggacggtgcggcgaacaccacggcaggcgcagcgaccagcgccagcagtgaggaacccttgaggaattttccgaatagcttggacatcgttttacatctccttgtctggtgagcaaattattcaggaaccgcttcgaaccccggcgcgtgccaaaggttcgaattaatttgcgttgatttggaggtaaaacggttcagcgaaggctctttctcgctattcctgggcagcagcctggaccaagccatcaagggtttgccgaagcgttgccgtatccggcacgcgaatcccgaaggtttcagtcagcacctgcaccacctcatcggcactgccaagcgagcgttttacgctcggccggtccagggagtggatcgcatagtgggcattgttcagggtatggcgcttgcccggcgccaggcgcgcgactttcagttggccgacgaataccgatttcgggtgggtggagacgtaccagttaccgatttcataatcgatatccgcctgtacttgcaggtcgaacacatacaggccgcgccactcctcggccacttgtgcccacaaggtgtaacttccctgcccgtcgaaagtcaggcgatacggttcatgggccgtggcctgcaccgcttcggtgtccagttgcaacgggctgctgggcaccatgccgccaaagccgacatcggtgatgtagcgcacgccgtccagagtcaccaggctcaagcgatgggtacgcgccgtgcgcgcatccggcggcccgcccatcaccacccggccggtgatgccacgcgcctcgaagccgagttcctgcagcaacgccaggaacatctggttcagctcatagcaatagccgccccgcccgtccaccagcactttttgttcaacactgggcaggtcgatcggcaccggcaggcgtatcaggctcgacaggttctcgaaggcaaagctgcacacatggcgcagttgcaggtcctgcaaggtttgcagggtgggcgccggcggcgtgtcataacccaggcgttgcaggtagaggcggctatgggtcagcagaggcatggcacgatccttgggcgcaggaagaaagcgtcactatgccgcgcccgcatgcagattgtcattttgaatgaacctttttgaacgctgccctatccatctataacaacacagggaggcaacatgagtaccgcaaaaatctacacgatcaattatcagctgcacggtcaaccgaaaacctttgtggtgcgtgccgaagtaatgaacaacgccgaggcctggcactgggcggcggtggatgccgatattgcccatgtgagtcgcgtgggacgcgtggggcatgagcaggtcaagaaaaccacccggccctgggcggagaagtttgggattacggatgtcacgtggatcgcacccaagtaagtgaacagcctcaccttgcaaggtggggcttccaacaccctttgcagttgaccgtttgcccatcatgagcagagctaacgcttcagtgaaatcaattcaattttactcgacctgtgccccgcctaaactacatcctaattattgatactcgaaatcaatctggcacctgaacaacccatcaggtgtgtcccagaaatcaggatgtcaggtcaccatgaacagcgagtttgaattcactcttaaaacccagcgtttcgacgaacattatcacccctcggaaaacacgcgcatcaccactaactttgccaacttggccaggggcaaaagtcgccaggagaatctgcgcaacacactgaggatgatcaacaatcgtttcaatgcattggcgcaatgggataaccccaagggtgatcgctaccgagtggaacttgatatcgtctctgttgaaatgaacattgactctgaacagcgtggcaacgccatcccgctgattgaaatattgaaaacaacgattgtcgatcaacacaccgatgaacgcatcgagggtattgtcggcaacaacttctcctcctacgtgcgcgactacgacttcagcgttgccttgtcagcgcacaaccagaatcagaccgagttcagcacacccgagaactttggcgacttgcatggaaaactgttcaagcacttcgtcaactcaaacacgtacaaagaaaacttcaaaaaaccgccggtgatctgcctgagcgtttcaaacaccaggacctatcatcgcaccgaaaaccagcatcctgtactgggttttgaataccaacaggacgcctactccctgacggatgactacttcaataaaatgggattgaaggttcgctacttcatgccttcaaacagtgttgcgccgctggcgttttatttttccggtgatttgctggcggattacagcaacctggaactcatcagcaccatcagcaccatggacactttccagaagatttaccggcccgagatttacaatgccaattctgcagccggcaaatcctaccaacccagcttgaagcaccaggattattcactgacgctgattgtctacgatcgagaagaacgcagccgcctggccattgaacagggaaagtttgtggaagagcacttcatcaaaccctaccaggctgttcttcaacagtggtccgcccactgcgcgctttgacgctttaatactacaaggtcatccctgatgaaaaagttgttacctacttcaaccgccggcagtttgcctaaaccttcctggctggctcaacctgaaacactgtggtcgccatggaaactgcaagatgaggcattgaccgagggcaaacacgacgccttgcgtttgtccctgcaggaacaacaacacgcgggcattgatatcgtcagcgacggcgaacagacgcgccaacactttgtgacgacgtttattgagcacctcagcggtgttgatttcgagaaacgcgagaccgtgcgcatccgtgatcgttatgacgcgagcgtgccaacggtcgtaggggctgtttcccgccagaagccggtgtttgttgaagacgccaagttcttgcgccagcaaaccaagcaacccatcaagtgggcgctgcctggccccatgacgatgatcgatacgctgtacgacaaccattacaagagtcgtgaaaagctcgcctgggaattcgccaaaatcctcaaccaggaagcccttgaactagaagccgccggggtggacatcatccaattcgatgagccggccttcaacgtgttctttgatgaggtgaacgactggggcgtggccaccctggaaagggccattgaaggcctcaaatgtgaaaccgccgtgcatatctgctacggctacggcatcaaagccaataccgactggaaaaagacgctgggatcagagtggcgtcaatatgaagaagccttccccaagctgcagcaatccagtatcgatatcgtctcgctggagtgtcacaactcccatgtgcccatggagctgattgaacttatccgcggcaaaaaagtgatggtcggggccattgacgtggccagccacacgattgaaacgccggaagaagtcgccaacaccctgcgcaaagcattgcagtttgtcgatgccgacaagctctacccttgcacgaactgtggcatggcgccgctgcctcggcacattgccaggggcaagctgaatgcgttgagtgccggcgcagccattgtccgaaacgaactctcgaacccgtagtaagaatgcgcaaggcctgacgatttcaggccttgcctggcgcattcgcacgccccccaattcaggaccgcctatgtcacctcccatcgagcccttgcgctttcgagaagccctcgggcactacgcgtccggtatcacggtgattacctcccacgttgatggcgagccggtcggcttcacttgccagtcgttctacagcgtgtcgatgagcccgccgctggtgtcattcagcgtcatgtccaattcggccagctatcccaggattcgccaggccggccggttcgccgtcaatatcctgtccggcgatcaagtcaggatttccaaccagttcgctcggcgaggcacagacaagtggcacggcgtggagtggcagggatcaccactgggcaacccgctcattgccggcagcctgcactggctggattgcgaaattcacgccgaacacgccgcaggtgatcacctgatcgtgatcggcgaagtgaaagccttgaacctgcatgaagcgactgcttcacagccattactgtatttcaaagggcagtatcgcgacctcgccacgcacgatgcgtgtcggcaagaatgagccgcgagcactgtggccggatcaagtcttcaaatctcccagcggatcgtaaggcggtttgcgctcgtccttgtcggtgtttttctgatccaatggcgcgatagccgggccaatggggtccacctgcggatccgatacatccggtgaatccggatcaaaccccagttcatcctgaccactggaatgctcacccgaagccgggcctttcgctgtgtcactcacggcgttctcctcatttaaagtgggcgagccttgtcatgcaggctttcaaggtcttcctcgacgcgttcaacgtcgtcgtcctgacgctccgccgggtcgttggggcgtaacgcatcgttgtcgcgttcctcctctccgggtgtgcggtcagggttgggggtgccaggcggtggttgcttgtattcgggcatgatggctcacctcaaagggtcttcatcaatttagagaaaccgccgtgcagcatcgttcaacttgtttgcccaagcgtgagatgatgccggccccttctggagagatgacccggatgttcgagctcaaaccctgcgaccctgtcaccttccgtcaacagacccggcgcagcacgctgatcgtggccgtgttgttcgtcgcactggcgatgctgctgtcgagcctggcggtgatgctgtttggtgcgcccggcggtgacaatttccgcttcaatgtcggcggggtgttcgccggggtgctgatcaccctggccctggtgcgtggcccgttctggacccaggcgtggctgacgccggcggtgtatggctggcagctcaagcgcagcctgatgagcgtgaccaatgtgatgcacaaggtcaccgagcgggtgcaggccaatgacccgacggcaatcaaggtgctgcgcttctaccacttgggcttgacgcagatgcatgaactggatgccaactccagcgcccaggtgcagttgctggctgaggtggaggcgcacaaggccaggatgcaggcgctggggatcgacaccgaacaaacccgtctcgaccccgcctggctggcagcctttaaaaccgcttaagccagcatgccgatgcgctgctcgtcgggccagaacagcgccgcctggccgcacggctggccggcgtcatcgagcaaggtccacaccaccccagcatgaatcatgaacggctggttgtgcgcatccacccgccaaccgctgtaaccctcggcgatgccgtgggcggtgacttgctccagcagaagctggcgcgcggcgcgatcgagggccgaggcgctgaagcgtgagggcatgccgataaagctctcgcgcgggtatttgaagcactgcaaggcgcagtcattcacatacgtaaatcgcggatctgcgccgccatcatgggccagcaggctgtagggcgcgtcgctgtgcagccaggccaggcgctgttgcgcgtccaggtgtgccggggccggcagtccctggccagtccagtgtcgataggccttatccagcacgcctacgaaggtttcttgagaggacacgtacaacctcacatcatcagttggaattttttgcccgccagcagaacaccgcgctcacggcgatggctgcaccggccaggccaaacacccacggcgccgaagcgatcggcaacagcaggccggcgagcaaggggccaaggccggcgccgatatcgcgccacacggcattcgaggccaaggccgatacccgcatcgacccggggttgcgctccgctaccagggtggtcaccagcggcagttgcaacgcacgcaacaccagcaccgccgccgcgccgacaatcacccagtaactaccgaacgccgtcagggccagggcactcaggaacgaaaacagcagcagcatcgaggtggcgccaaaacgctgggccgcgcgaccgcccaacgggctcaggagcatttccgagacataacgcagcgccatcaggccgccggcaatcagcaccgcatccccgcccagcagcttctgcgcctggatcgacaggccgaagataaacagcccgtccagcgctacgccctcgataaacgaccacaccgccacactgtccggccatttgaagcgtcggcccggggtgctgtgcaaatcatgcccgaccgtaggtaagccgcgcgccatccacaagcccaccaggcaacacccggccagaatcagaaagatcggacgcggcccggcccacagcgtcagccagccgcccaggggcagcgccagcatcggccccagggcgatcaacgcccgcgagcgtccggcgcggcgtgcggcaccggcgggctccgaggtggccagcacttgggtcgacaggttcaatgcggcaaaacacaggccccacaccaggcgcaggcagagcaatgcggcaaacccggacaacatcgagttgcccaccgcacacaaggtcgcggcgccggcggcgatcatgcaggtcaggcggtcgccgttgcgtgcgtagaaattgagcacatgccggtagccgaaaatccgcaccaggcggttggcggccagcaacaccccggcctgggccagggtgataccgaacgcctgggattccatgggcagcagcaggtagagcaacacgtcactgggcaggcataaagccagggtcaaagcggcgcggcgggaatgagtatcagcggtgcggagggccaggctggacataaatctgaaacatcccgaaatattcaggtcgccacggtagcgttaatcagacctttttcccatagggcaacaaacgcagaccactggccaccgcgcccaccagtgcaaacccgcagcccagccacagcgcatagtgcgggccactgcccacggacaagtgaaaacacagggccaccagcgaagcacccagcgtctggcccaacaggcgtgaaatcgccacgatgccgctcgccccaccgctgcgggccaagggcgcgctggtcatcaacgccttgaggttgggtgactggaaaaacccgaacccggccccgcacagcgccatgcgccagccgatatcaaatgccgaggcgccgctgcccagggtggccaacgcagccatccccacgctgagcatcaacaagccgatgccgcacagcacacccagggacacacggtccgccagacgccccgcgaccagcgccatcaccgccaccaccgccggccatggcgtcatcaggaaaccggtttccacctggctgtggccgagcaccgcctgcaacaaaaacggcagtgacacaaaggccaggccctgggcgctgaaggcactcacagcagtcaaggaagacaaggcaaacaccgggcgcttgaacaggtcgagcgccagcatcggtgccgggtgcccggcctggcgccgcaacagcagcacaccgcagaccagtgccacggcaatcaggcccagcgtcagcgcaccctgggcaccgtgcaccgccgtgcccaggcccagcaccagcagggcgaacagcccggcgcacaacacggcggcaagccgatcgaaggcatgccccgtcatcggcagggtcggcaacgagcgcaagcccagccccaaggccaataaccccagtggcacgttgatcagatacaaccaatgccaggtcgccaccgacagaatcgccgacgcagccgtcggcccaagggtaaaggccaaccccaccaccaacgagttatagcccagcccgcgcccgagcatttttgacgggtagatatgccgcagcaacgccgtgttcacgctcatgatcgccgccgcacccagcccctgtgccacccgcgcagcggtcagggtgaccagcgatccggccaacccacaaaacagcgacgacacaataaacagcagcaaaccgccgaggtacacccggcgatgccccagcacatcactgagcgacgcaaacggcagcaccgtggcgataatcgccaactggtaggcattgaccacccagatcaccgaggcggaatcggtaccgatcccctcggccagggtcggcaatgccgtgttgacgatggccgtgtccagggtcgccatgccgattcccagggagatcgcgatcacggccggcaggcgtttattgaggggcaacccatcggcaacagaagacatgaacaatccgcccaggtgactaaggcggttagattaatggcagcggcgaatttattcagtggtggataggctacctgtcagtattttcatgttcgcgcccattgaaagagacctcctacattgtcccgctgcaatttttgcgagggtgacgttcctctgcccttacgagaaactcactgatggacaacgatcgtaaaaccgcgcattgcgatgcacgccggcattttctgcgcctggcggccaccagcgccggggctgtgcttctggcaggtcagttgccaatcgcctcggctcacgtggccgacacgccaaccagcattatcgacccgcagcaggcgttggcgcgattgatggagggtaacagccgctacgccgccgacgtgacaaagcgccgcgacctgatggtggagcgcgaggccttggtcagcggccagcatccgttcgcggcagtactcgcttgcgccgactcaaggattgcgcccgaatacatcttcgataccggcctgggcgaactgttttgcgtacgcgtagccggcaacttcgtgacggaaaacgggctcgccagcctcgaatacgccgttgcgatgctggggacgccattgatcctggtgttggggcatgacagctgcggcgccatttcggctggggtcaaggcggtcaaagacaacgtgaccttccccggtaaaatccagagcctggcggatgcgatcaagccttccgtgaacaaagtgctgaaagcgcccggcaacctgctcgacaacgccattgcgcaaaatgtccgggacaccgtggcacggctcaagggcgaatcaagcgtgctggccgacgcccttgcccaaggaaaactcagcattgtcggcggcacttaccgactgcgcagtggcaacgtggagttcctggcgtgatcaggtgcgccagtgcccagtcttcgccatcacccctaccgcctcggcaaaacccgcctggggcagcgtgttgagcgtgaccagccccacgcagcgtgtcggtttcagggtcgccgtgtgcgtcgccacgcgtgcgccctgctccacaccggccagcaccgcctcagggatatgcagcgcgttcatcagttccagcacatcctggccgagcgtggcgtcatcggcctcgcgcaggtacggcacgatcacccggaaaccttgcgccgccagcggcccgctgaccgccgcaaacacgctcacatccgccgccaacaagataatcgcgcggccctcctccggcccgaactgctcataacggacctccccttcatccgtgctcacctgttgcagcgcaaacgcaggggcggcgatcaccaccgacgccagcagtagaaaaccacgccgatcaaacatcactcacccccacgatcaattcactgcccagccaagcggccaggtattcacccgcctgcatgacgccggcctcttcccccaggcgctgcaccagcaattcacacagcccggcgaaactgccgtcagcctgtacgtgctgcaccgcctgaagctccagcgcatccatctgacgcagccgcgaggtgaattgccgccgccacaccagcaaaccgcccgcctgctccagcatcatcgcttgcggcgcgggcgtttcctgccacagcgccgaccagatggcctcggcattggtggtcaagtcgtggcaacgcaacgacggtgtgagctgcactaccgcggtgtcccagtccagctcggccagcgcttccagggccagcggttgcgcgtcagcggcgacaaaggcttcattcagggccgactcgatccacgccaactcatgcacatccggattgcgcgggaacacctccttcaaggtggtgtagaacccctcggggtacgcgtccagggtccaggcatggggcggatggttgtcgatgtgcgtaatgctcgcggccaggaacgcttcctctccaagccaacggcgcagggtggggaaagcctgttcgaggcagcccaccaactgggcgcggtagttgttctggtacaccgccagaccggtgtgattgctgcccagcaactctgcggattcatccgacgcggtcaccagccagctacgaaaagcctgctgaagttgcgccaggttcatcgcgctgcccccaacgtccgggccatcgacagttcctgaagcagctcggcgagcggcgggatctcatcatcgcgctcgatcatggtcgccaccggccccagccgggtcatggcctgggcgtacagttcccagacgccggtgcacaccgggctgtcatggctgtcgatcaagatgtcacggccctggctgtggccagccaggtgcacctggcgtactcgctcggcggggatgccgtcgagaaacgccagggcgtcgaaaccgtgattgctcgcactgacgaacacattgttgacgtccagcagcagctcacagccagtgcgccgggccatggccgtgatgaactcccactcggtcatggcggcaccctcgaacgccaggtaactcgacggattttcgaacagcatcgtacggcccagcacgtcctgggcctgatggatattggcgcagacccggtccagcgcttcgtcggtatagggcaccggcaataagtcatgggcattgaaaccgccactgcgcgaccagctcaggtggtcggagacaaacagcggttcaatttcatccaccagcgacttgaggcgccgcaggtaatcggtgtccagcccttcggcggtgccgatggacatggacacgccatgcagtgccaccgggtagcgctcgcgcacctggcgcaggatgtgccggggctggccgcccgcgaccatgaagttttcggagatcacttcgacaaaatccacgggcaccgaagtctccaggaagtcgcagtaatgctccttgcgcagccccaggccgtagcctgaaaagtgagggttggatgtcgacatgacggatctccgcaacgaataagtggcgagcccacacagggcccgccgggtggattacttcggttcggtcaaggtgccaccggccttgaggcactcggacggggtcttgacgatcacgccttcgcccttgcagctgttgagacccttacagtcgttcttggcggtggcacacaggctggtgcctttacaggtgttgacgccgtagcagcgcccgggtttttcctgttggtcggcggcgctggcggcgctgacgaatgaggccgaggccatggcaataagggcggcagcggcagcgaggctcaggcgggatttgagtgcagtgttcatgggtgtttctccagggttggggtgaattacttgataacggaagcagcgtcttcgatgaccttcgccacagcctcgggctgggagatgtacaccgagtggctggccttgatttcggtgaccttggaaccggcacgcttgtacatccagcgctgcaggtcggggctcagggcacggtcttcggtggagaccaccgcgtaggtcggctttttgtgccaggccgcggcccacacggtgccgccgaacagggcagtggtcgcgggcacctgggaggcggccatgaagtcggtgcggttggtggtcaggtcggcggcaaagtcggcgttgaacctggcacggtcgaagaacaggtgaccgtcgcggctctgcttgatgtcatcgctgggcgccggcatggagccgatcaactgggccatgttctcgcccacttccggttgcagcgccgacacgtagaccagcgacttgaccttgtcgcggtcgccggcaatcgagatcaccccgccaccggaactgtgacccaccagcaccaccgggccgacttgctgctccagcacttcgcgcgcctcggccacgtcggcggccaggttctcgtggccctggtgcaccaccgtgaccttgtagcccttgtgaatcaggatgtcgtgcaccacacgccagccggagccgtcgacaaacgaacctggcacgatcaccacgcttttaccggtgccgggctgcggggcatcagcggcctgggccagcatcggaacggtcagggccatggcaatggccagggaagaaagcatacgcattggaaatctccatcaaagttaagaacgtttgcccaggatcaggcggtccagcgaccaggccccaccgccatacgccagcagcggcaacagcaggcccgcccaggtcaggtgcaccggccaggcatcggggtacacaaacacctcgatcaccagagtcatgcccagcagcgcggaggcggccggacgggtcagcaggcccagcaccagcaacagcgggaacaggtgctcggcgtaggtcgccaggtgcgccgcccactccggcggaatcagcggcaaggcgtactccgagcggaacagcgtgtaggtcgacggcttgagttcaagaaacccggtgaccttggtgcgccccgacagaaagaacaccgccgcgatccccacccgggccaccagcaacagcagggcttcgggcagcaggcgctggatcacggctgctccgtgaggctgccgaagcctttaggggtcttgatctgggtgcaggtgcctttgtccaccagcacccaggcattgccctggtagtcggtggtggcggtgccagcacacgaggtgcctttgccggcggcgcagtcgttggcaccggcgagggacacgccaaagcatttttcctggggcttgggctcgtcggcgtgggccacggccgcgaaggcactgagggacagcgcaagggttgccgcgagggctgcgtaaggacgcttcataagatgagtctcctggcttgactgagtgtggccagggcgccttggaggtcggtgaccgcctgcgccagctggtgagcagagttaaagccaggcgtgtatccgctctgtgtcgcgaacgcgatagaacgtcatgcgggtgtatcagaatggtgcagggatacagttcgatacacagtcaataaaacagtgccaaaactccggcgctgtattcggcatcccgaacgacacaattagaaatattcgcctttccgaacgaaggctttttcgtgtcctcgacgaccacaaaaatcaccataaatttcatgcggttgttgtcatgtttgttacatgccaactggcatacattctgctttatccgtatttctggtaataaaatgtttcagccctgagacagtctcatcccctgaagcactacctgagacacaccataaaaacgaccacgccccaaaggagggcggcctctccgaccttttgatcgacatcaactttccaagactgctgctgcacatctgtaccccaaaaagggcgaacggcctgaacgccgataacaagcccgactataaaaaggacgatttgatgagctcgagcaagaaccacgcagtgtccttcctggatgcagaccaccccgcgccggctacccccgacagcaccctgggctttggcccctttctattactggccaagcaacatgtgttgttgcgcaacggcgaaccggtcaccctgggcagtcgcgcgctctacctgttgattgccctggtgacccgtgcgggggaactgctggagaaagccgaactgatcgccttcgcctggcccaaggtggtggtggaagaatgcaacctgcgcgcacagatcgtcgcactgcgccgggccctgggtgacgatggcaatttcagttatatcgtcaccgtgccgggccgcggctatcgttttgtcgcccccgtcaccgtactggcagccgctaaagagcacctgcccgtgccctatgtgcgaatggacgaacccaacccgccgacgccgacggcggaggtgatcggccgtgacgccttgatcgccagcctggcggaccaggtcatgagccagcgcttcgtcaccctcaccggccccggcggtatcggcaagaccaccgtggccatggccgtggcgcagcgcctggccggtgaactcaacctgggcacgtgctttgtcgacctggccccagccaccagcggccaatgggtggccggcatgctcgccagcgcattgggtatccagaccgtcagcgcagacccactgcactgtgtggtcgccagcctggccaaccgccgcttgctgctggtgctcgacaattgcgaacacgtactgccggccaccgccgacgcggtggaaaccctgctgcgcggcgccccgcaatgctgtgtgctgaccaccagccgcgaaccgctgcgtgcaaacggtgaacgggtgcacgacctggcgccgctggaggtgcccgacgcacacgcccacctcagcgcccagcaagccctggcctggtccggcgtgcgtctgtttgtggaacgcgtccgcgccctcgacccgagttttgtgttccacgacgccgacgtcgcggccgtcagtgcgatctgccgcaaactcgacagcaacgcgctggcgatcgaaatcgccgccgctcgtgtgcgcacctttggcgtccaggacctggtgggcctgctcgacggcagtttccgcctgcaaatgaccggccggcgtaccgccctcgcccggcaccgttccctgagcgcgaccctggactggacctacgccatgctcagtgacgacgaacaggccatgctgcgccagctcgcggtgttcaccggttccttcaccctggaggccgtcaaggcgatgactaccagcagccgcctggccccgcgcaacgccctgcccttgctcgaaagcctgatggacaagtcgctgctgatcgccagcgaatccaccgtgcccaagcgctaccgcctgctggaaaccacccgcgcctacgccttggaaaaactcaacgaacagggcgaaacccgcgccacctgccaacgtcacgcgcgctatgccctcggtatgttgcgcgaagccgggcgaaccctggatggcctgtcgccgggcacctggcttgccctctacgctgcggagatcaacaccattcgggccgccctcgaatgggcttactcgcccaccggcgacctgcccctgggcatcgagttgaccttgggcggcgtgccgttgtggctacgggtgtcgctggtcagcgagtgccgcagttgggtcgatagaggcctggccagcgacgccctcgtcccgctgcccttgcgccagcgcatgttgttgcagaccgccctggccagtgtgctgatgctcacctacggcaccggcggcccgatgcgcgaagcctggcgccaggtgtgcgaagacgcccgcgacctcggcgatgccgagcacaagctgcgcgccctgtggggcctgtggaccgaccgttgcggctgcaaccagtacaccgaagccctggaacttgccgagcgctatatcgcgctgaacagcagcggcagccaacaattgctcggcaaacgcatgcgcgccgtggcgctgttccacatgggcgacctgatgggtgcacggcagaacatcgatgaagccctgggctcgccgtcggcaccgcgctcgcacatcatcgacctgcacttcgaccaacgcatcgccgcccgttgcctcaaggccaaggtgcagctgcttgaaggcgacgtcgacccggcgctgcgcctgatcggcaactgcgtcgacgaagccatctccctcgaacaccccgcgaccctctggtacaccctgtgcctgggcgccatacccctggccctgctggcgtccaacctgccgaaagtgcgctattacctgggcctgttgcaagacagcaccaccggccaggacctgcacatttggcggcaatttcgcctgtgtttcgaaagtatcctgctgatccgcgaaggcgcgccggaaaccggcgtgccgcaactgggcgaagccttgcaccacctgcaaggccagggcgacagccagctgtacagcctgctgcgctgtgaatacgccctgggcctggcgcgcctgggcctggaaaaactcgccctggaagtgctggaagacaccctgcaattggccctcggccgccatgaacgctggttcgtgccgcaaatgctgcggatcaaggcacaactgaccttgcgccaggcgcactatggctcggtggacaaggccaccgtgctgctgcgccaggcgtgggtcgacgcgcagttggcgggcgcgcacttctggcgggcgcagatcgcgaccgacctggcgcgcctgcaagaacccaagctgcgcatcgcctccctgccgcgcttccagcaccgataaagtggcgagcagacttcctgtggcgagcgggcttgccccgcgctggggcgcgaagcgcccctaaaaccaggcgacccgtttccggctggagatatgcggtgactgggtttgagggtcagataaggcgagcagccaccagccagtccgccacggcctggaatgaagcatccggcaccggatcccccggcacggtcctgcgcgcgatctcagccgccaggcccttgtccggcgcatggggaatccccaggtcatacgcctcctgcagcatcaacaacgcctcctccggcgaagcccggcacacgatcaccggcaccggggtttccccgcgtacataacgcacgccaatcacccagccgtcggtggtgccgatcatcaaggacgcacggcccaagcccagcttagtcgccagggcctgcatctcattgcgctggcggcggcgttcgcttttgatcagcgggtcgccgtcgatgtccttgcgttcgcgcttggtctcactgcgggtcatcttcatgtcgcggccgaacagccagcgttgcatcatcacgtccacgccgcccaccaggatgaacgcgcacagcacggtgaacaccagcggcttgagcaccaggaaaaacgtcgaatccatgcactcggcaccgcagcgcgacgactccatcagcgcctgcaacgcatgcttgccgaccacgtagaacgcgattgccagcacgtgcaccttgatcaggcccttgatgaattccaccaggttgcgcagggcaaagatcttcttcatgccctccgccgggttgatgcgtttgaactcgggtttgatcgggtcggtcgagaacacaaagccgcgcatggtgatgatattggtcaggatcaccaccccagtggtcaccgccatcaccggcaaggtgatgccgatcaccagttgttcggcgtggtcgagcaccctgggccacacggtggcgaacggttcgatgtagatctgcgcggtgaggtcgatcagcgccgcgacctgggccttggcccgtggcgccagaatggaaatgcacagcgtacagaacaggatgaccatgcccgacaccaggtcctggctcttggcgacctggccctttttacgtgcgtcctggagcttcttgtccgtggccggctgggatttttcttcgctggtatcggccatgggctactccatgccggccagggtcttgagcagttcgacggtgccgcgaaactccgctagttggtcaagcatcagcgggatcaggaagccgatgtagatcaccatcaggatcgtgaaaaacaggtttttcaccggcagcgacaggtcgaagatatgcaggttcggcgccatgcgcgacaggtaggcgagcatcaggtcggtcaccagcagtgcgatcaacagcggcgagaccatcagcaccccgacgcgcatgatctggtcaaggatcgacaacaccgccagcagcgccgagctggcgaacaccggcgtgaacgaggtgaccggccagagctggtagctgtggtaatagccgtcgaccatcagaatgaaaccgccggacatgaagaacagcgtgatcagcatcaccgtgagcagggtcgccatcacgctggactccccggacgacaacgggtccaccagttgcgccatggtcgagccgcgttgcaggtcgatcaactcccccgccacctcggcggcccagaacggaatgccgaacagcaggccgatcaaaatgccaatcaggaattccttgatcagcaacccggcgataaacaggctgccgtgctccggcatcgaggtcagcgcgtcgaacaccgggaagaacatcgggatggaaatcgccacggccacacagccgcgaatcatgccggtgagccccaaccggttgaacgccggggtgatcaccaccacacccatggcacggcaggcggccagcgacgcggagctgatcaccgggtaggcgacttcgaggaactgcgcggtcaggctggcatccatgggcggtcagcgcgtccacatcgggaaattatccagcacctgaccaccgagttccgcgacttgtccggcgagaaccggaccgaggaacacgatggtcagcaacaccgccaccagcttcaccacctggggcaacgtctggtcctggatctgcgtcagcgcctggaacaggcccacgctcaaccccacgataatcgccacccccagtgccggcgcggagagcatcagcaccgtcatcagcgcctgtttcatcaatgacaggaatacgtcctggcccatgggtcgtgcctcagccgtaactcagaatcaaaccgtgcatcaagcgcgaccagccgctcagggacacgaataaaaagatcttcagcggaatggagatcaggttcggcgagaccatcgacatgcccatggccatcagcacgttggacaccagcaagtccaccaccaggaacgggatatagagcaaaaagccgatctcgaaggcgcgggtcagttccgagctgacgaacgccgggatcagcaccaccaagtcatcgtcacgcaggtcagtgcgtgcctcaggcgaccagatggtctcggtggcctgcacgaaaaaaccgcgttcggactcattggcgaagcgcttgaggtgcgcctgcaacggcggacgcaatgcgtcgcccaaatccttgagttgctccacatgctcgatgttgaggtcgcgcccctccacctgtcggtacatgtcgccaatcaacggggtggtcacgtacaccgacaggatcagcgcaatgccgtacagcaccaggttcggcggcgtctgttgcacgccaagggcgttgcggatcaggaacagcaccaccgagatcttcatgaacccggtgagtgtcaccaccgccagcgggatcagcccgatcgtcgcaacgaccaggatgatctcgatcaggttcggctgatagccggtcatggggtggcaaaactcagcaggcgcacccccaggccgtcaccgattttcaccagttggccctggccgacgcggcggccgttgaccatcaggtcgacgctgtccacgcccggcgtgttgagctgcaacaggctgccggcgcccagttcacgcaattgcgccagggtcagttccaggctgcccacctggcacaccagtttcaacagcaggtcatccagcgcaacggcggcatcaacatcggtcatggcgttctccggttcggcaaagggggcttgcaaggcttcctgcaggcgcaggacttcgccctggtattggcagcgcgcctgcaggcggccgtcgaggtcgagcaaaaggcccgggcctggttccagcatcagcacatcgccggggcgcaggctgcgcagttcgccgaggctcagccactggcgccccgccaccaccgccagggtctggcacaggcctggcaaggggtcgggttcgacctcggcgtattgcgccagcaactgcgcaaccagcaccgcggcgctttcgctcaggtccagctgggcgctcatcgcgggttggttgccgaaggtcaattccagcgccaaccgcagggcaaacacgccctgctcatcagcggtttcgagcacctgcaccgggtgaccgagcaacggttccaaggcttcgatcaggtcgagcagcgccagctccagcaacaacgcgcgcggcagcgcaggcaacggctgcacatcgaacggcagcgccagcggcagcgtcagttgctccagcgccgcagcagacagacgcaggcgcaccggggcacggcccagcgacagcaacacgtcacgcggcgcatcaaggctgtgcactgcggcggcccagctcacgcgcaggtcctgcccagcgcaacggccctgccaggggcggcgacggcgatgcagttggttgtgcagggccagcaatgccgggtcgtagtgggtcagccacggcgacagcgggtcggcaagggctgcgatcatatgccggtgccctcatcacgcaactcgccaacgcgacgctcatcgctttcgcggccttcgagcaggctttgccaggcgtcggactgacgctggcgactcagtcgctcctgacggaacagatcgcgttcgcgctcctggctttccaaggtgatggagacgtggctcacatcgttttccagttgctgctggtcatccgacaggccgcgcaagcgatcctgggcggcctgccaactggcgaccgacaggccttcggtcagggacgcataaacctgccgcgcttcctcggcaatcgcctcacggtgcaggcgcaattgctccttggcgtcggtcagcacaccgtgggtctgctcgcagcgttgctgctgcgcggccagttggctggcggcgcgttgttcgcgcaacacccgcagggtttgcagggtacgtagttgttcggttttcattgggctgtctccatgttcatgccgatacacacatcggtggtgagcctgcttgttgtggcgagcaggcttgtcctgcgttggggtgcggagcagccccttgtaaactcaccaggctcttccagataaaactcagcgcctggttttggggctgctgcgcagcccaacgcggggcaagcccgctcaccacaacaggcctacccagcacaacaggcccgctcaccacagcaagcccgctgactacaacaggcctgctcaccaccacaagtcggttcatgccaacacctggcgcatgcggttcagggtttgttccaggttgctcggctcatccgcgttctgacgcaggaaggcttcgatagcggcgtggcggttgatcgcttcatcggccaggggatcgctgccggcggagtactcccccacgcggatcagcatttcgatctcgccataccgcgccatcaattcacgcatgcgcatggccagtcgcttgtgttcttcaccggcgacctgctccatcaaacggctgcgactgcgcaacacatccaccgccggaaagtagttgcgctgggccaactcggcactcaacgcgatatgcccgtcgaggatcgaacgggcctcttcggccaccggatcactggcggcatcaccctcggtcagcacggtgtacagcgcggtaatgctgccgctggggccggggccggcgcgttccagcaaacgcggcaaggccgagaagaacgacggcggataaccgcgccgggtcggcggctcgcccacggccaggccgatctcgcgctgggcacgggcgaaacgtgtgaggctgtccatcaacagcaatacgttgcggccctggtcgcggtggtactcggccagggtggtagcgacaaacgccgcacgcacccgttcggcggccgggcggtccgacgtggcgaccaccgccaccgtgcgcgcacgcgcctgggcgtcaagctgcacatcgagcaattcgcgcacttcgcggccacgctcgccgatcaggccgatcacgatcacatcggcttcactgttgcggatgatgctggcgagcagcgacgacttgcccacaccgggctcaccgaagatgcccatgcgttggccctgggccagggtcagcaggccatcgatggagcgaatgcccaatgccatggagcgcacgatcagctgccgcgaaaacgctgccggcggttcagcgtgcagcgggtaatgctgcaacgctacggtcggcggaacgccgtcgccgtcgaggaaatcgcccatggggctgatgacccggccgagctgcgcatccccgacggccacgcccagggtttcgccggtggcggtgatttgggtgcgcgtggacaggccttccatggagccgatgggcgacaggatggcttcgtcgccgtcaaaaccgatcacctcggcgctcaggctgcgcgcgctgccggggtcgcgcagctggcacagttcaccgatgctcgccccggccacgctggcgcgcagcaatacaccgcgaatactcagcacggtgccgtgcatgggtcgcgggcgcgcctgggccaggcgttcggtgaggcgtggcagcaggtgttccaggttcatgccacgccctcttcggcgaagggcaacaagctgcgacgcaggttctgcaattgggcttcaaggcccagttccacagagccggccgggctgttcaggcgggcctggccggcgctcagctgttcatccgcatccactgcaatcgccagcccctccaacttgaggcgttggcgcaaggcatccacgtccgccggcggcacccacagggtcagggcctggtcctggcgaaacgcgctcaacgcctggcgggtactgcgcactacgcggtcggccgtgtccaactcacccagcacttcgcgcacgatacccagggccaggtcgaccagggacgtttccagactgctcaagtaatgctgcacctgggcttgggtagcgagcagcagttgcgccacctgttcagcaccggcttgccgggcgctttcgaaaccctctgcgcgggcgctgctcagccattgctcgctgtcggcgcggatctgctcggcctgcgccttggccgcctgcaggaaggcaaaaccatcgctccatagcgcggcgtcttcggcgcgcaggatgcgggcggtggggcggcttggcaattcagtcatggcgtgatctcctcggccagcaggcacgcggcggcggcctggacgatttccaggtcgcgtggcacacgggcgctgtggccctgggggaaggcaaagcgcaaacgcagccagccctgccagtcggcatgctgggcgtgcaaccaggccgcgacgcaaccttggccatcgcggtcgatggcgtcgaccaactcggccggctcgcgcagcagatccgccgcgccaccgagttggcgcaaggccagggcgctcacgaagacttcagcgcccaggccttcgcgcaattcattgaccacttcgcgacggatctcgcggctcagggtcggggcatgccagatggcgccgcacaaccttggcaagcgggcaaactgtgtcggcgacagcaacagcaccgccaagtctgccgccattggcgtggtcaattgcgccatgggcgccagttgatactggctgaccagcaactgctccaggcgctggcgaaagcgtggctggccctgcatcgcctgcagcacggcgtctggcaattcatcggcaaaacatgcacccaggctcggcccgcgcacaaaccgcagcggctcggcaatcagcccctgccagcgttcgaacaaactcattcaccctccttgagcacatacaacgcctgggactgacgacgtgcccactgctgacgggcgagcacacccaccgcaccgagtgcgatcagcaacaaggcgccgaacatcagccgcgcctgggccaggttgtcttccagcagccacaggcccatgaaccgcgccaggcgcggctgcgccgggttctgactgatggcgacggcggccttgatcgcggtcaccgaaacgccgtcgtaactcaacccggagatgccgttggcgaccagcgtcttgatctgcgggatcagcgtattgatatcggtgtccgggtcgtaacgcaccagcaccgaggccgacgatggtgaaatcacgcgcttgagcaggtcattgtccggcagcaccacgtgcacgcgggcggcgacgatgccgtcgatctgcgacaccgagtgcgacagctcttcgctgagcgcatagatcatctgcgcccgctcctgcaccggcgacgacaccaggccgttgcccttgaacacttcgcccatgttggaaaagctctgctgcggcaggccggcgttgtcaagcagggtcatggcttcggcaaagcgtgactcatccaccaccaccttgagctggccgttgtcctgggccttgcgttcggccgggacgccaccgcgcagcagtaccgcgaccatggcattggcgtcgcgctcgctgaggttggtgtagaggtcggtgttgcacgcctgcaacaggctggcgagcaggccgatcagcaacaggcgcagggcgcggtttgggcttggcatacggttattgacccttgagcagcgtgttggcggaaccggaaatctgtgtcgcaccgcgcaccaccatctgggtttcgatggagtaatcgaacatcttgcccagggagtgaacgatctggtcgacctgttgctcgccgacttttttccccggttcaccctggggcgaagcactggcggtgcggatttctgcctgggccggcggcggtgccgaaggattgttggtgagcaggtcggcccgttcggagaaagcccgcgtacggtcgatgaaactgttcatgcgctccatcaggcccgagccgatctggtgcgggctggcgccttcgggcatgcccttggcggtgttggccatgtgctcgaacaggttctgcgaggccccggcgggccccgcgccggcagacggcggcaacgccgaagcaccggcagcgagactgatagtcataggggtttcctactcttcgtcgtcatcggacatggcgtcgttcagcagttcctgcatcttcggcatgatgatgaactggccgccataggtgaccgcctgggtgatgaacgaatcggtgagttcggcgtcggtgggctcgttaggtttatcggcggtcttggcgttttccaccgccgcattgaacttggcttcagggctggcgccaccaggggtgggattgctgtctacggccgttacggacatggtgctgctcctttactgggttggggtttcggtactgacttgcgcgccacggaacacccgcaccccgcgctcgcgcgccaccggggcggcggcgaccttgggttgcaggtgatccacatgctgctgcaccagcgccaggtacggcggtggtccggacacgaacacttcatcgccctcggggccgttgcgcatcgacaactgctggccgaacacatcgaggttgttgaggtaggcctgcaactggtcgaggtccagggcgttggccttgaagagcttggtgctgatttcatcgctggcgttgaggtacaagaggttgccgtcgaagtaccaggtgaggccgttggtgctgcacagggtttgcaggaactccccggcggtggccgcgcgaatcgtgctgcgagccttgccgcggaccttgtcggagagcaccagcggcacatcgaggttatgcccgaattcttccagggcactgcgtacatcctggtccaccagtacgtaggcgtacggctgggagaaccaggcaggttcttcggcagcgtgggcgaaactggcgctgaacaggcataggacagccatcaaaaatatgcttacatggcctccgccttcgccagacgagttgtgacgatgacccctagatttctgctcgccagtaccctgctgctggccgcctgcgcccaccagcctgcgaccgatgccgacaagtccctgcaactggccaacgacctgagcaagcgcggcgactacgccagtgcggcagcgctgtacgagcgggcggcgcagcaacccggcgcgggtatcgagctgtggctcaagctcggccaggccaagctcgacgccaaggatgcggcgggcgccgagcgtgcgttccagcaggccctggggttcgatgcgcgcaatgccgaggccctgctcggcctgggcaccgcgcaattgcaagtgggcaagacccagcgcgccgccaccgccctgggccaggcggccgagatcagcggcttgccggttgcctacacccgcctgggtgtcgcgcagatcctcaatggccaggccgctgcggcgcaaaccgcgttcgccaagagcctgagcctcaagcccgacgacctcgacaaccgctgcaacctggccctggcgtatgcgctgggtgggcagtcgcagcaggcgctggacaccatcacccccgtcgcccagtcgccccgcgcattggcgcggcatcagcgtaatgagttgttggtgatggtattggcggggtacgaaggccgcgtcgctgcgctgccgttggacgatattcccgcagccgagcgggcgcggttggtggatgaagccaagcggatcagggcgatcagtgatcccgtggcgcaggctcgggagttggggttggtggatccgcgctgaatctgctgcagatgacttttctgtggcgagcaggcctgttgtggtgagcaggcttgccccgcgttggggcgcgaagcggcccctgtcaaattcaccgcattccaacagacagttctcagcgcctggttttggggctgcttcgcagcccaacgcggggcaagcccgctcaccacaggaagcccgctcgccacaacaggcccgctcaccagtataggcctgctccccacagcaagcccgctcgccacagcaaggaacacaggtcattgcttgccccctgacgcatcagccttggcttcctgctggtccttgcgacgctgcaattgctcgcggtcgaacccttcgatgtacacctgggcagcgcggcctacgggcgcggccatggccgggccggtggcgcggccttgggtcaggtcctgcttgcgctcgaccatttgcatcaggttcaaattgttcgcacagccaagcgccaacgtcggtttgaaatcctcacccaacccgacggtgtccgtcgccgggggttgctggcactgggtcggcaagccatcggcgcggtattcggacgagtaatacgtcggcgccaggtgggtctggcaacccatcagcgccaggggcaacagcagcaacacacgtaaaacagtcatggcaggccccttgatcaattcatgtagaaaccgaacgccccgccgctgcgcggtccggtggccgctgcggtagccggtggtgcgtcgaggggcgtggcgaggttgcgaccgcgcaccggctccaccaggtacggcgtaatcaggatcaccagttcggtttcattgcgctggaagcgcttggagcggaacaggttgccgaggatcggcaggtcgcccagcagtggcagtttctcgatgtcctggctgctttggcgctggaacaggccggcgatggcgaaagtctgcccgctgccgacttccacccgggtatcggcacgacgcacgctgaaggacggcacatggaaatggccgaaatccacggtgccgccgctgaccacctggctgacttccgggcgcacttgcaaggctatgcggccgttgggcagcagggtcgggttgaacaacagcgacacgccgaacgacttgtattcgatgcccaccaggtcgcggttgaccggcaccggtatcgccacttcgccaccggcgaggaagctggcggtctggccggtcatggcggtgatgttcggctcggcgagaatctgcagcacgccgttggcctgcaaggcgtcgagcatgccgtcgatattcacattgccggagcctgcgcctgcagcggccaagccccccgccgacgctgctgccaacgggccaccggtgatcaggccgaacgagaacgtgccgttgttgaacatcgcattccagttcacgccgtagtgcagcaactccgaacgcgacacctcggcaaagcgcacccgcaggttcacctgggcggagcctgcatattcagtggtgttgatcgcgctctggaaaccctgcccctggggattgagcagcgcgttcaggtctgtggcttccgccaccgagcctacggtgcctttggcgatcagacggttaccggcaccgctgatctgcgcagcgttgccgggatgcaatgcctgcatcggcgccgtcaccgcctggctggcgctgctgacggccagactcaggttcgccagttgcttaccgtcactgccgagggcgatcaggctggtgttgcccggcgccttgccgaagatgtagatcgtgcccggtgacaccacctgcaagtcggccacattcggttcggccaccagcaccgtgtccacgggagcgacaaaatgcaggatgcgcccttcaccggaggccagggcgatagagccaccggcgccggcggcgatttcctgagcctggctcacgcacgaaaaaacactcagcaacaatacacaaaaacgcatcatgaggcagacgccagggcagtgacggaagccgcggcaggcgcgcggcgattggaaatctcggtcaggctgatggtcaccagcgcttgcaagttgtactcggtggccagctcgcggaacgacagcaccgccagttccagctcgccgcgcaccaccaggcgacgcaggctgcggcgcagttccgggtgcaccagcaacaccgcgctgttgacctcgcgggtgtgctcgcaggcctggcgcagttgggtgagcaaggcgcggctgacgtcctcggggatcaactcgcgctgcggttcctggcgacgcagggcgccgcgcaactggtcttccaggcccggcgccagcaccagcgcaccgatcacccggttgcggtcggcgtactgatggctgatctgccgggccaacgcggcgcgcaggtgttcggccaggcgcccggcatcggtttcacgggcgccccactccaccatggcttcgagcaaggcacgctggttgcggatcgacacaccttcgccgaccagcaaacgcagggtttctgcgacccgttgcaacggcaccaggcgcagggcttccttgaccagttcgccgtaggtggcctcggtgcgctccagcagcaggcgggtttcctggatgccgaggaagtcggcagcgtagcggcgcaggctgcgttccagcacaccgcgcaacacctcgtcgggcagcaggaaaccgatgccggcgttgcgcaacgtgtcttcgtgctggcgctcgacccagtgggcgttgcggcccgtgagcggcgagtcggcctgcaccgtggcgaggtcgagcaactgcacgtgcaccgggtcgtcctgcaccagcaggcagttgatcggcaactcgccttcgctgaccggcacgccttccagggacacgcggaaactgcccggtgtagccttggcctccatgtagatgcctggtaccggtacgtcgacgccgagttcggtgcgcaagtcgtggcacagcgcttcgacgcgttggcgcagcagttggcgcggcgcgctttgggacacgccgctgccgatggtcagcagcacgcgggcgtcgggcagcaggttgtcatccagttcggcctggacttcgaccaccggctccggcgtctcgaccaacacttcaagttccggctggcggtgatgccggcgatacatcatgaacgccgcaccgccgaacaccagggacaagccgaggaacacccaggtcggaaaccccggcaacaggctcacgccgatcatgatcaacgcggtcaaccccagtgcacggtagctggcgcccagttgcttgatgatctcgctgcccaggtcccccgcttcaccgtcgctgttgacacgggtgaccacggtgcccgccgccaccgaaatcagcagcgccgggatctgtgcgatcaggccgtcgcccacggtgagcaacgagtaggtgtgcaccgcgacgccgaacggcatgtcgcgctcgatcatgccgatcagcatgccgcccagcaggttgaccgccaggatcaccaggccggcgatggcatcgcccttcacgaatttcatggcgccgtccatcgcgccgaacatctggctttcgcgctccaggcgtgaacgccggcgccgggcttcggcctggtcgatatcgccgttgcgcaagtcgttgtcgatgctcatctgcttgcccggcatcgcgtccagggtgaagcgcgcggccacttccgctacgcgctcggcgcccttggtgatcaccacgaactgcgccacggtgatgatcaggaacaccaccatgcccaccaccacttgcccggcgatcacaaagtcgccgaaggccttgacgatatgcccggcatcgccgtgcagcaggatcaagcgcgtggtggtgatcgacagcgacaggcgaaacagcgtgctgagcaggatcagcggcggaagcgcggagaactccaccgaatggccgatgtagaacgccacgatcaggatcaggatgctcagggcgatattgaggccgatcagcgcgtccaccaggtaggtgggcagcgggatgatcatcatcacaatcgccatcagcatgaacgcgacgatgatcacgtcggtacgctgcgcagccaggcgcgccaggttgttcaggcggttgagtgcactcatgcgccggccctgcgtgcggccaggtagcgtttgaagcactggcgcgcgtcgtccttgcgttcgccgtaccacaaggcgcgggcgcgcagcagcaacaggctggcggactcgccttccagcgccaccagacggtcgagggcgccgagggcgcgagtcgcgtcgccgctgtcggtgaaggccagcaccagcgagcgcagcaacgcgccgtcatcgggagcgacgttgaccgcgatcagcagcatcaccagggcgcgttgggactggccattgcgccggtacagctcgccgatgcccttgagcagttgcacggcgtcgtcgttatcgcgagccatcaggcatgtacctccgagcgttgctgtgcgagggtgcggcgcatctcgatttcttcaccgatcagctcgacggccagttgcttgatgtgtggctcggtgtccaggctgggcaggatgtgttccatcacatgctccagcagctccagggaacgggcgctgccgaacagcagcgagtcgacgccggcggcgctggtgagttcttcgaggtcactgcgcagggagcggcgagtctgggtcttgcgggtcttgagcaccgcttcgaaagcggtggcctggcgcgaattgaccgggcgcacggcttcgaccggggcgctgcgtacgtcactggggatcaacgggcggggttcgactttcatcccagggccttagcttaaaagcatggtcacaacgtgaaggtgaagcgctcctcgccacgggcgaggatcacttggttgttttcgatgcgttccagcacccagttgtccgccagtgccgcgccggggtacaggcgcttgccgctgtcgttgatcacatagggatgagggccgaaccacacggcctggaagcgcacgcgcggcgccgccgcatcggcccgcgcggtgacacgcgggttgagcacgatctgctggccgtaacgctggtcgaaggctcgctgcaccgccagccactgcagtttttgcgactgttcgaaggtgccggtggcgctgagctggccgttgctgttactgactttcaccgtgtccagctgggcggcttgcagctgctgctccagccaggccttggcctgctcgcgggaaggttttttcagcggcgcaacgtcggccacggcggttgtcggcagcagcggtgcttcactgcgaaacgccagcgctccagcacagataaacagcagtgcggtcgcgacgatccagggggtcaatttgcgtggcgcgggcacgggtttttcagcaccgcccggcattgccaggctcacccccgccgtgccgatgcgcagctgcaccggcagccgcgcgcgatgaccgttgccttggggaatgcgcacattgccggcgatcaatacgtcaccgcccaaggcttcgaccgccacctggccgccttcaaaacgcaggcgcaggtgcaggccggcaatgccgggatcgctgagcaccagatcagccgccagatcggcgccaatggtgtagacaggctggtcgagcaccagggaactgccctgatgcaaaccgccggtcaccgtcagggtcggcgcgccagttgcggcgaacggacccagggaaatcagggctgtcatagtcgggtttgcccccttgagcctgtgcaacggggtcaagaatcaggataaaaacgggacttgaggggtaaacgggcagcgccggcgctgcccgtttggcgaatcagttctgcggacgctgtttggtggcgtccagctccgcttttttcgcggtgctgatttcggtgatcttggccgacttctcgatagccatgttgaaggtcgcttccatcttcgcgatagcgtcgtcggcgccgccggcttttactggtgggacatcagccatgttcatctccttgcatcgatagggaagttattcagttgcgcaacagcacgctgaaagtatgcaaaccggtgaaggcccaaaacgtcagacagtgaaccttcgaatcgccgttggtttgcatggaatccatactactcacgatcaaaacgccttcgctgtgaaagcttgtgaaacgtttcagacaggcactgtgaaaggtgtagctcaacctggcattgaaaaaaactcatcgccggagcggcatggaacttttagcagaaaccaaaaacacgccacaggccccgatttacggggactcacctactgtttacagaacgaagctgaacaataaacctcgatggagacgcccggcacagcgctgctcggcaattattttcgcgacaacgtcacatttttcgctaatagccttttgcccaacttccagggtatttcgatttgtaacaacagcgacttaatcatcgcgtttgataggcctcccccaacaacctaattgcggggggagcaactttccgccgtgcctgttagtgcaactgcactaataaccaaaggacgcgtttgcaggccggctatatatgaaccttccaggtgatctatgaccgacatgaattattcacccccaactttccttgaagacgacggttgcgttgagattcacttcggcccttatcgactgctgcccaagcgccaccaactgctcaggcatggccagccggtaaaccttggcagccgcgccctgaccctgctgatcgccctggcctcgcggcccggtgaattgctgcagaaaaccgaactgctggacatcgcctggccgaaactggtggtggaggaatgcaacctgcgcacgcagatcaagacgctgcgccgcacactgggcgatgacgatgtgccgtacatcgccacggcagcgggcatgggctatcgttttgtcgcgcccacctggttcgagcgggcggcgcacccgcgggcgatgaggccgtcgggtggtggcggtgaacgtgtggcgggcggcttggtttagctcagggcgctcaggtccagatgcccatccttgatcggcgggcaccagtagtaaccaccggtcaagggggtgctgatgcggtacagaccatcgacaatcccatcctccaacccgctcatgcggcgcagttgcgcttcgaacgcatcgaaggaatgcccgaacgcgaggaacatcaaccctgcctggccattctcggcccatggcatggagcgacgtaccacgaaggcttccggcgtgaagctttcctgggcggtgcgcttggtgtgggcggactcgggagcgtcgtcgagttcttcgttgtcgccgtggcggcgaccgatgatgtggtcgcgctcctgagccggcagcgcagcgaagccatcgaggtcatgctgccattgctggagcgcggcaaagctggcgccgctgtcggtcagggcggcttcaaccgcggcgtcgtcgtgggggttttcggtgccgtcttcgtagtcggtgaggtcgaagccggtcttgtagcggaaaccttcggtcatctgcaccaggcgaaatgccggggccagggccttttcaaaggcacggctgcgcaatagcaattcaccgcgatcctcgccatgcagccacacccacagagcttgctgagtggacggattgtgtgcgcccggcccgctgactgccggaaaactgcgcaagccttcaacgcgtgtgcccagtgcggtgaccaacggctcgcccagaccgaccactgccgccgagtcgaccagttgcaccagcgcgtccagcgcagcaggcacggcggccagggcctccacggcaaaaaacagatggcgtgcctgcaacggcaccggtgcggcaagaatgcccggctggtactgactcatgtgaactccttctgaaaagccgcgcagtttaaccgccgggctcagccatgcgtactagaaagcgcgcaagccttgccatagagcctgttgttgggtgactctctagtcatgttttgcaactattccaggggtagcgccatgaccaccagcaacctgctcgctcagctgtttcccgcctccgccgccgcagttcccaagcaattccagctcggagcgcccattgaacagcgtgattacctggtcgacggccagttgcaggtgtggaacggccccttggccaaggtacaaagcccggtgcagtttggcgacgagcgcgtgcatatcggcagcacaccgctgctggacgccgagaccgcccttaccgcactggatgctgccgtgcgtgcctatgaccggggccagggtgaatggccgacaatgcgcgtggccgagcgcatccagcatgtcgaagcgttcctgcggcgcatgcgtgaacaacgcgacgcagtggtcaagctgctgatgtgggagatcggcaagaacctcaaggactcgcagaaagaattcgaccgcacctgcgactacatcaccgacaccatcaacgcgctcaaggaactcgaccgtcgctccagccgcttcgagctggagcaggacacccttggccagatccgccgcgtaccgctgggcgtggcgctgtgcatgggcccctacaactacccgctgaatgaaaccttcaccacgctgatcccggcccttatcatgggcaacaccgtggtgttcaagccggccaagcttggcgtgctgctgatccgtccgttgctggaggcgttccgcgacagcttcccggccggggtaatcaacgtgatctacggcagcggccgcgaaaccgtcagtgcgctgatggccagcggcaagatcgatatctttgcgttcatcggcaccaacaaggccgccagcgacctgaaaaaactgcacccgaaaccgcaccgcctgcgcgcggcattgggcctggatgcaaaaaaccccggtatcgtgctgcccgaggtggacctggacaatgcggtcagcgaagcgctcaccggctcgttgtcgttcaacggccagcgctgcaccgcgctgaaaatcctcttcgtgcatgaagacgtggtcgaccgctttatcgagaaattcaaccagaagctgaccacgcttaaacctggcatgccgtgggaagacggcgtggcgctgacgccattgcctgaaatgggcaaggtggattacctcaacggcctggtggccgatgccgcgcaacacggcgccaaggtggtgaatgaggatggcggtgaaagccgtggttcgttcttctacccggcggtgctgtacccggtgaacccgcagatgcgcgtgtaccacgaggaacagttcggcccggtggtgccgatcgtgccgtaccgcgacctggagacggtgatcgactacgtgctggactcggacttcggccagcaactgagcctcttcggcaccaacgccgtggaagtcggacgcctggtggacaccttcgccaaccaagtcggccgcatcaatatcaacgcccagtgccagcgcggcccggacaccttcccgttcaacggccgcaagaactcggccgagggcacgctgtcggtgcatgacgcgttgcgcgtgttctcgatccgcaccctggtggcgaccaagttccaggagagcaacaaggcgctggtcagtgacatattgcgcaaccgcgattcaagtttcttgaccaccgattacattttctgaaaacgacacacccaaatgtgggaggggcatgcccccttccacatttgggccgcgtaaccctgaatttcgaggccactttactaccgatgaacctgcccttcttcgcccggcgcctgttgcgcccgttgctcgacccgtatcgccgctaccgccatgccaagctgatccatgccgtgcgggtctccatcggcttgctggcaacgatcctgctgactaccggcatcaacctgccccacggtgagtgggcgtcggtgaccatgctgatcgtgatcggtggcttgcagcaccacggcaatattggcaagaaagccgtggaacgcgcctacggcaccttgatcggcgccagcgtcggcttgttgctggtggtgcagcaggcctacttcggccagcccttcctgacctacctgttgatgtcggcggtgtgcgggttcttttcctatcacgccatcggcaagggcggctacatcgccctgttgtcggcgatcacggtgtttatcgtcgcaggccacggggacaacccgatctccgatgggctatggcgcaccgtggacatcctgatcggcattgtgctggccttggcgttctcgttcgccctgccgctgtatgccgtgtactcgtggcgctacaacctggccagtgcgttgcgcgattgtgcggcgatctacagccggatcatcaatggccagtcggtcaccgatgacgagcacctcaaattgctcaatcgcttgaacgcggcgatgctgcaactgcgttcgttgatgccgtcggtgtccaaggaagtgcggatttccatgaccgagctggacgcgatccagcggcatttgcgcatgtgcatcagcaccctggagattcttggcaatacccggcccgatccacgagatgaacaggcgatggcgcggatgcaggtgatgttgagggccgaacatcggcaaattcgggtgcagttggtggggatggcgcgggcgttgaagtcgggggtgacggagcggttggagcggcccagccctatcacgggcaccgagccagcactggatgcgccagtctacagcgcgctggatggctatcggttgttgacggtacaactggcggcaaacgtggatgcgatgcgccaacgcctggccaaaagtgccgggcactggaagatctagagaggtggcctgttgccgtgtttaccaacgtcaacactttcacactttctcttacatatttttcacgttttattcacatcccggaacgtagggtgaagcctcatccgttacaaatgttgcatatcaagcccgccgccccagcgggcttttttttgcctcggatttgacctagcgggacgccttgacggcgggggctgtcgcttgttcgcgaatggcccgctgggtatccagtaccttggccaatgcggtttccgcttccgggctttgctgtggcacacgaatcgccgccgacaccagggtgatcaacttggccatcacctcggcatccgtcgccgggcggcccaggctcatggagttcatcagcaggcgcagctcggtgccggccatcaccccggaaatcgccttgagggcaaattgcaggcgcacccccagttcattgcgcggcaggtccggcaaggccagggcgaaggcttcgaagaaacgctggaacaccggctggtaatgcaccttgaggtattcctggataaacggcgaggtgtcgctgtagacccgccccaggaagcgaatgaacgaacgcccttccccactggcgctggccgggtcgctgcgctccaggcccatggccggggcaaacagcacgccgagcaaggtgtcgcagtccagtgggccgtcggactcggcttcacaccgcgccaacagttccaggcgctgctcgttgagcggctccaggcgctgcttgagcagggtttgcatcagggagtccttgtccccgaagtggtagttcaccgccgccaggttgacctgggcacgctcggtaatctgccgtaacaaaaccgcgtcatatccgtacttgatgaagagagcctctgtcgcatccagcaatcgagtcttggtaatgtttggagcgctgactttcttcgcgaccatagaagttccacgtgggaaatattgttttaaaaaataatttgattttttataccggggccgccgcctgaaagcaagtagtgacactgcgccatatgatcaaaagcctgtgcccacgggctcgttcaggctggtcgaacggtttttgagcggactgcgacgcccttgaggaaatcgtttcaaaggatgaaaccgctctatatccatggctggcgaagcagcaggaacacggttagtattcaaacaatattttaaaaacaagaaataaaaccagtccgtgacgcacgccaggccgctcccgaacttgtaacaatgcttttccggggaccgcacggcatcgtcgagactgcaggcgtagtcatgatgacagatacccccgcgcacccaggcttgatctccctgcaaggcatcggcaaaagctatcagctggccgggcaacacctggccattctcaatgatgtgtgcctgtccatcgccagtggcgacagctgcggcatcctcggtgcctcgggttcgggcaaaagtacccttctgaacatccttggcctgctggacctgcccaactgcggtcagtaccacttcgccggccacgatattttcaacgccacaccggaccagttggccgccatccgcaaccagcagatcggcttcgtgttccagagtttcaacctgctgccgcgcctcagcgccctggacaacgttgccctgcccttgagttatcgcggcgtatcacggcatgagtcagtggaacaggccctgcgcatgctggagcaggtcggcctggccgaccgcgcccaccaccgccccgccgacctatccggcggccagcgccaacgggtcgccatcgcgcgggcactggtgggcaacccgtcggtgatcctcgccgacgaacccaccggcaacctcgacagcaccaccgcacaggagatcatggacctgctgctggcgttgaaccgcgaacagcaagtcacgctgatcatcgtcacccacgacccgcatatcgccgagcgcctggaacgcaagatcctagtgcgcaatggcgtggtgcaagaggcccgaagcctatgagcttgcgggtcgaacaaagcctcagccagctgctgcatgaagcgttcgtcagcctgcgcaccctgggcaagcgttcggtcctggccttgctgggcatcgtcatcggcagttcgtcggtggtggcgttgatcaacatcgggcataacgcggcagtggatgcggcaatgatcttcaaggacatgggcaccgacaccctgatcgcccagttcccagccaaaggcggtagcagcatcccgatgcccgcccgcctcgacctcgatgccgtgcgccaaaccgtgccgggcattgcccatatcggcgccctcacgctgttcagcgggccgatcgtgttccacggccgcaccaccaacgccaacttcgtcggcagcacgccagacatcaaggacgcgatgcgcctggtgatacagcaggggcgcttcctgtcgagcttcgatgccaacgaaacctacggcgtgatcggcgaccaactggcccaggcgctcggtgcgccaggtgaccccctgcaactgggcgaccgcgtgcgcatcaacgactacctgttcctgatcgtcggcatcctgcgcagccagccccgggcgatgctgatgccggtgcaggccaatgagtcgctgttcatccccgccgaaggcatgcgccgcatctatgccacaccgcagatcggcaatgtgatcatccgcgccacacccggccaggacatggagcgccttgccaaggacgtggctgccgccttgagctcgcagctcgccgaccacgatgcagacatccaggtgccccagcaaatgatcgacggcatgacccggcaaagccgcaccttcgcctatctgctgctggccctgggggcgatctccctggtgggcggtggcgtcggggtgatgaacgtgatgctgatgaacgtctcggagcgccgtcgcgagatcggcattcgcatggccctgggtgcgcgccaacgcgacatccgcaacctgttcctgctcgaagccgtgaccctcaccgccgtcggtgccctgtgtggcgccgtgctgggcatgacggcggcctggttgtacgcctggctgtcgggctgggaatttgccctggcggtcgccgccttgccgctgggggtgggcagcacgttgctggtggggttgttcttcggcatctacccggcggtctcggcctcgcggttgcaaccggtggaggccctgcgcgatgagtaaatggctatggctgctcgcattcgccagcctgcccggcatggccgccgatgtggtgatcaagccctcggcccccagcaccacccgcagcggctacgagcgcagcgtgtcgttgaacgcccagaccaccgccatgaccctcggggatgcggtgtacctgggcctgcgcaacaacccggcgatccgcagcgcgtacctgcaacgggtggcccagaagttcgacctgcgcgtggccgaagatgtgttcaaccccaaactcaccctcaacagttactaccgcagcacccggggctccgccgacagtgcgcgcaatgccaacgtggcgcccgccaccagcctgctcggcgagtacggcacgcgcctgagcatggcctggacccagcaactgagcaacgccgaccgcgccggtcgctaccgcagcgacggcctggacctggcagtcatccaaccgctgctgcgtggcgccggctgggacgccaccaccgcgccgctgcgcctgtcacgcctgtcggaacaggccaaccgccttaacctcaaggccactgtggcgcagaccatcagccagatcatcgccacctaccgcgaactgctgcgcgcccaggagcaactgagcatcgtgcaggatgcgctcaagcgttccggcaccttgctggacgtgaacaaggcgctgatcagtgccgggcgcatggccgaattcgaaatcgtgcagaccgaagccgacatcgccacccagcaactgggcgtggaggaagcgcagaaccaactggacaccagccgcctcgccctgctgcgcctgctggcgctggacctgtccacgccgattcgcgccaccgaagccctggaggccaggcccatgcagatcgacaagcgccaggccttcaccctggcgcagacccagcaacccgaatacctcgccgccctgctcggcagccaacaggccgacctcaacttggtgatcgccaaggactcggggcgctggcaagtggacctggtggccggcgctaaccaggtgcgcgccaacaccgacaacgacgcgggccgttccaacaaccgtacctgggacagctacgccggggtgcaggtgcagattcccatcggcgatatcagcacgcgccaggccgaagtgcgcgcacgggtgaatgtggaggaccaggccatccgcatcaccgatgcgcgccaggaattggaacgcagcgtcaacgatgtggtgcgtgaccttggtacgcgctggcgccagtatgaaatctcccagcgcgccgtggaattgtcgcggcgcaagatcgaaatcgagcgggaaaaactcagcgccgggcgctccaccaacttccaggtgctgagcttcgagaccgatttgcgcaacgccgaaaacgcgcaactgaatgcgctgatcgcttatttgaacgcccagactcagctcgacttgaccctgggcatgacgctggaaagttgggaaatcgccctcaatgactactaatcagaaacgcctgctgggtgttgtgttgatcgtcctgctcggcggcgcgggcctggccttgcgcagcccggcgtccgatccaggcgctgccagcgaacagtggctggccgtcaagcccgaggcgctggagcaccggatcggcctggtaggcaagatcgagcccgacaccaccatcaccctcaccgcgcccttcgatggcaacgtgcaagccaacctggtggaacaaggccagcgggtcgaggccgggcaggtgctgttgcgcatggacccggccacgctggaggtgcaattgcgcgaagcgctttccgcccagctcaaggcccggcgcaccgtgcaagagatgcaggactgggacagtagccccgccgtcagccgcgcccgccgcagcctgcgcaccgccgaaatgaccgccggcaacacccagcgcaaactcaccgaaagcgaaaacctgttcaagcgcggcatcatcccgcgcaatgaactggacgacctcaagcaacagacccagcagcaacagctggaccttgcctcggcccgcagcgaactgcaacaggccatcgaccagggcaagggcgagtaccgccagatcgccgatatggaactgaccaacgccacggtgaaatacgacgccctgcacaaactgctcgatggccaggaggtcaaggcgccgttctccggcatcgtggtgccgccaccgggcaacacctcatcccagggcggcggcaataacaatgccccggtgcaggccggcagcaaggtcagccagggccaggtgctgtttgggctggcgaatatcgaacgactgaaaatcaccgccaaggtctcggagctggacatcaaccaattgcaccagggccaggcggtggaagtgctgggcgacgggtttgatggcgagcgcctgaccggctcggtaagcgtggtcagcggcctggcgattgccaacgacagccagggcagcgcgcagtttccggtgaccctgtcgatccccaagctcacgccgcagcagttgcaacgggtgcgcctggggatgagtgcgcgattgaccatcgtgacctacaacaatgcccaggcgatggtgattccgagccaggcgatccaggcagatcacacggtggagtatcgggaggcgatggataaaccggtggagcgggtgaaagtgaccacggggcaagcaacggcgcagggcgtggaggtgttcggcctcaagccgggcttcgtgaagacctcaagataaatggagcccctgccacatttagatctctgtcagctttgaagccagtgccttggcttgcagcgccacatcagtcaccgccgtgctttcccaccacatcccacgcaacggcgggcccatggcgaacaatcgctggctgacctgcccctgggcgtccaccactgcccccgacgtatccgccgcaatccccaacgccagcggccctggctggatcagcccacgcttgagcaactgccggggcaatggccgggccacgcggcgccagtcgtattcgataccgctggagttgatcagcgctgcgcctgagaccagggtgatgccttgttcgccgcgataacgcaaacgaatcgtcaccccttcacccgaaggttccagccccttgaacgacgccgcaaggatccgcaaccgcccctcttcatgcagccgcgccaccaactgcgcgctcaatggcggcgaacggtggtgatggctctcccaccagggccgcacatgcctgacgaactggcgcttctcacgctcgctggcctggctccataaacgcgcgatatgcgcacgcacggtgtccagcggcgcttgccagtcgatgccctgggcctgcgcaagcgcgcattgccgccgcacctcgcgcagcaattgccgagggctgcgcaggccatggtcctccccaagaaaatccacccaggccggcggttgccgccgcacatggggcagcaggccgtgacgcgagaacacctcgatcggcccgcgatgcccggcctgttccagggagaccacggcgtcgaccatggtcagcccggaaccgatgatcagcaccggcgcctgcgggtcgatccggcgcatcgcgctcacgtcccacgggtccaccgccgccgcgttcaacccgctggagtcggtctgcggtgtacgcgccgccgggaacatgccggtagccagtaccgcaaacgcgccacgcaattgctggccgttatcgagggtcagcagggttgagcctgcatccacttgcaggtcgaccacttcgccacgcacatgctccacgctggacgcggactgcgccttcgcctcggccaaacgttgctgggcatacaagccgaatatcccgcgtggcgggaacagttcgctgatcggcacgtgctgctggtcggactcgggccagccgccagcgccgatgtagtcggtgagccattgggtcaggtcgtctgggttgtccgggtcgacactcatgcgcgccgcgttgccgttcagggtgtggcccagttcgacggcgctgtaggcctcgccccggcccagctcggcacgcggttcgaccaccagcacccggcgcgcgcccggcaggcgcagcagttgcacggccagcatcgtgccgctcaggccgccgccgatgatcaggacatcagcgttgcggatggattcagtcatgcggagtcgcccttactgtttgcccaggtaaatgtcatgcagatcaccccgcgccagcagttcagcggcgctgccactcaaggccacgtgcccagtatccaatacgtagccgtgggacgcatagttcagcgcgacgttgatgttctgctcggcgatcaggaagctcacctgctgctcgcggttgagctgagcgatgatcgcgaaaatctcctgcacgatcataggcgccaaacccatggacggctcgtcgagcagtaccaaagtaggacgggtcatcaatgcccggccgatggcgaccatctgctgctcaccgcccgaggtgagaccggcgcgggtatggcgcttggtcttgagccgtgggaaccaggcgtagacacgttccaggtcgtgctccatgtcgcggcgactcaggcgtcgcacaaagccgccgctgcgcaggttgtcttccacgctcagttggccgaacacatggcggccctccaacacatgcaccatgccctggcgcacgcgctggctggggtcgatgccggccaggtcgccaccggcgtattcgatcacaccgcgactgacctcggcccgttcggcacgcaccaagccggagatggccttgagcgtggtgctcttgccggcgccattggcaccgagcaaggcgacgatggcgcccttgggcacgctcaacgacaccccggccaccgcgaggatcgcgccgtcgtagatcacttcgatatcgttgaccgtcagcagcgatggctgcgcggcagcggtggcgggctggctcatggtttattcatccccggtgcaggtgcgtggcgtcaggcctttttccttggcgaaggcggcggacttttcatcgatcaacggacgcaacagcgcacggtcggcggcgatccagtcgctgatcagcgtccaattggcgccgtcccactgctgcacccgcgccgagccgccaccctcgtggtcgcggcacgacagcttgaggttctgcatcaggcccaggtaacccatgtccttcaagcgcgcatcgtcgatgttcaggtgttccaggccccagcggccttcttcgccgttgagcgggcgcttgccgaatttggcctggccggtgcggatcgcctccaccgccacggcggcgttcaccaggccggagttgtagtagacgctgccgaagttcttcaggtccttgaggtcactgtggcccttgtcgaggatgtattgcttgaggcgtttgtggatctcgaaatccgccccggccgggtatggcgtaagggccaggtagcctttggcggcggcaccggcgggcaatacgtcttcgctggaactggcccagatatcgccgatgatgtggtccaccgggaagccgaagcgcgccgccgtcttcaccgccaccggcgtggacacgccccaggtgcgcaggaacacccagtccgggttggcctggcgcacctggcgccattgcgcggactgttcgttgccggggtcggccaccggaatctggatgttttcgaagccgtatttttccgccagcaacttcagcgggccgagggtttcgcgcccgtaggccgagtcgtggtagaccgtggcgatcttcttgcccttgagcttgtcgaaaccgccttcacgctcggcgatgtagttcaccagcgtcgaggcctcactgtagaaagtcagcatcaccgggaagttatacgggaacaccgtgccgtcggtggcttcggtgcgaccgtagccgagggtgatcagcgggatcttgtccacctcggcccgctcgctcagcgcatacgccgccggcgcgccattgggctggtacaccgcgaccggcgcgccatccaggccattcttgaagcgctcgtagcactcgatgcccttctccgccgtccactcggtctcgcattcctgccacaccagcttgacgccgttgatgccaccttcgacctcgttgatgtaacgcaggtagtcgatcatcccggcccacacctgcacgccgctggacgcataggcgcccacacggtaggtcgccaggggaatgaattgctggtccggcgaggccatcgcctgggggactgcaccggccaaagttgccagcgcaaaggcagcgccgaccagggaacgtttcaaggatgcacgcatagggattctcttaagggaatgtcagaaacgcagcggccactgccgcacgcggtcacgcaggttgtgcaacaggcgaatcaagccctcgggctccttgatcaggaacacgatgatcaacacgccaaaaatgattttctgcaggttctgcaactgccccgcatccaccgagccgccgaacagtgcctgcccggcgtggctgaggaagatcggcagcaaactgataaaggccgcgccgacaaagttgccggcgatactgcccatgccgccgataatgatgatgaacaggatctggaaggagcggttgatatcgaagctgctggcgctggccgtgcccaggtaggcaaaggcccacagcgcaccggctatccccaggtagaacgagctgaccgcgaacgccaggcgcttgtagcgcaccaccgggatgccgaccacggcggcggcggtgtccatgtcgcggatcgccatccagttgcgcccgacctggctgcgcaccaggttgagggcggtccaggtcagcagcagcacggtgaccagggtcagcaggtagcggcccaatggtgtgttgaggtcatgaccgaacagcgccagcctgggcgcggaaatggtcccggacgaaccgtagttgtagaaccagggaaacttgacgaacagccattccaggaagaactgtgcggccagggtggtgaccatcaggtagaagcccttgatccgcgaactgggcaggccgaacagcaggccaaccaacgcactgatgatcccgccgccgagcagcgcaaccggcaaacccagatccggcaggcgcagcagaaaaccgtaggtggcaaacgcaccgacggccatgaagccggccgcgcccaccgaggtctgcccggtgtagccggtgagcaggttcagacccagccccgccagggacagcaccaggaacgggatcaggatcgcattcagccaatagtcattgccccacagcggcaccccgataaaagccagtgccaacaggccgatcaaggcccagggaatgcgccgctgaatcagcagcaacggcgcggtgtgttgtacaagagggatcgacatgctttcagactcgctcgatggcgcgctcgccgaacaggccggcggggcggatatacaggaaggccagggccagtacgtaggcgaaccacggcgtgataccgccgccgatcaacgggccgatgtacacctcggccaggttctccgccgcgccgacaatcagtccgccgacaatcgccccgccaatcgaggtaaagccgccgatgatcaacaccggcaaggccttgagcaccaccagcgacagcgagaactgcacgccctgacgcgcgccccacagcaacccggccaccagcccgacgatgccggccacggcccagacgatctgccagatgcggttgaggttgatgccgatggacagcgccgccgtggtgtcatccgccaccgcgcgcagcgacacaccgatgcgggtcttgttgaacagcagcgccagcaccgtcaccagcaccaccgccgcagcggcagcgatcaggtcgaactggctgagcatcagcgggccgacgaacagcggcacgtcgtcgatgcccaggtccagcgcccgcacctgggagcccatcaacccctgggccaggccttcgataatgaacgacaggcccagcgtggccatgaacaaggtgatctgcgaacggttcaccagtggcctgaggaccaggcgctcgatcagcagcgcgccgacgctcatcacgatcaccgtgagcagcaacgccagggcaaacggcacgccctggtcatgcaggctgacgaaggtcagtgcagcaaacagcagcatcgcgccctgggcaaaattgaatacgccactggccttgtagatcagcacgaagccgatggcgaccagcgaatacatggtgccggcgagcaggccgccgagcagggtttcaaagaaaaacgtcatccgtttaccactcccaggtaggccgcgatcacctcgggattggcttggacctgagccggcgtgccgtcaccgaccttgcgcccgtagtcgagcaccaccacatggtcggacaggcccatgaccacgcccatgtcgtgttcgatcaacaccacggtggtgccgaggtcgcggttgacgtcggcgacgaagcgcgccatttcctgtttttcttcggcgttcatgccggccatgggctcgtccagcagcaacaagctcggccctgcgatcaacgcccggcccagttccacgcgcttttgcaggccgtaggacaggttgcccaccagcacatcgcggtgggcttgcagctccaggaattcgagaatgccctgtgcgcgcaaccggaacgccttggcttcgcggcgtgcgcgaggcaagcccagggcttgttcgataaagctgctacgcatatgccgcgacaggccggtgaggatgttgtcgagcacactcatcttcttgaacagcgcgttgttctggaaggtgcggccaatgccgcggcgcgcggcgcccaacgggtcgatgcggtggaagtgctggtcctcgaacacgatctcaccggcatcaaagcggtacacgccgttgagcacgttgagcaacgagcttttaccggcaccattgggaccgatcagcgcgcagatctcgccgcgcagcacctcgaaggacagggcattgatcgccttgacccccttgaacgacagcgagatatcccgcacctgcaaaatggcctggctcatgcgatgtcccgtttgaattccgccacccacaccggtgaaggcgtggctttgacgggttgccagatgtacgccaggcgctggaaccccaggagccggcgcacgcggtttttcagcaggcgccgcaagccactttgcgggtgggcgatggcccagtcgcacaggcgtcggcgccaggtgccgtggggcgccaggcggctttcgatctcatcggccaggtgctgcaagcgggcgggcgacaacagcaggccggtgggcgcgacttcactgcggtcgcgacgcgccgaggccaggctctccgggaaggccaggccgtgaccactgttcagccattgctccagcaccacggccagaccgccctgccagtgggtaccctcttcgctccacaacagggtttcccccgtgggctgccaccagcgtgccaggtgttgcgtcggcgccaacgggccgagcaactgggcaaaatccaacaagttggccgactgccagtgccgcgcagtctggcggccctgcacataggaatgagtcgggcgaatgcgccacaggtgctgttgcagtgcctcgggctccaggtcatcggccagggtcagcacctgcccgccgatgacgtgcgccgccagggccagcagcaacaggttcggctcgaacgcaccgctgagggccagccgcgattgctcgctgaacccctgctggcgcaaaccatcggccaggcgttccacatcgcgcaaggcgtcgatccagcgccatgcgcaccactgcccccggcgcttgtggcgcagggcactatgcagcggcgtgatctgcgcccagtggtgcagttgttcgagggccttgggcaggtggccgagccactcggcgggccactccacggccagtgggcgtttgagttcgtgcacgctcataggggtagtgctcctattggtgtgtgtgcgtgcggtggtccgctggctggattatttggatcaacaccgatctactgtgggagggggcttgcccccgatggcggtgtgtcagtcacaagtgctttgactggactgccgctatcgggggcaagccccctcccacattggttatgtgcgcgtcagataaattgcggtagccggcaccagggtggttggaggccaaccttgcgccgtcgccaaacaacttctcgcgcaacgtgccctgggcatactcggtcttgtacaccccgcgcttctgcaactccggcaccagcaggtccacggcgtcgatgaaggtctcgtgggtcagcgcgtaggccaggttgaagccgtccacatcggtctcttcgacccattcctgcaacaggtccgcgacggtttccgggccgccgacgaacagcgggccaaagccgccgataccgacccagtcggccagttcattcggggtccagaccttgttcggatcggccgtcgagaacgcctctaccgccgattgaatggcgttggtgtgcacgtgcttgagcggtgcatcgggtttgaactggctgaagtcgatgccggtccagccggaaatcagcgccatcgctccctcgtagctgacgtaggatttgtattcctcgaacttggctttggccttggcatcggtctcaccgacaatcacggtctgcaagttgaagatcaggattttctgcggatcgcgcccggcttcggcggcacggcggcggatgtcggcgacggtctttttcagcagcaccttggacggcgcggcgacgaatacgcactcggcctgttcggcggcgaactgcttgccacggctggacgcgcccgcctggtagagcactggcgtgcgctgcggcgacggttcacagaggtgaatgccgggcacctggaagtgtttgccgacatggcggatctcgtggattttgctcgggtcgctgaagatccggcgttcgcgatcacgcaacacggcgccctcctcccaactgccctcccagagcttgtagcagacctccaggtattcctcggcgtagtcgtagcgcgcatcgtgttcggtctgggctttctggccgaggttcttggcgccgctttccaggtaggaggtgacgatgttccagccgatacggcccttggtcaggtgatccagggtggagagacggcgggcgaacgggtacgggtgttcgaacgacaacgacgccgtcaggccgaagcccaagtgttcggtaaccagggccatcggcgcgatcaacgacagcgggtcattgaccggcacctgcgtcgcctggcgaatggccgcgtcgccgttgccgttgtacacatcatagatgcccagcacgtcggcgataaacaggccgtcgaactttccgcgttcaaggattttggcgaggtcggtccagtattccaggtccttgtactgccacgaacggtcacgtggatgcgcccacaggcccggggattggtggccgacacagttcatgtcgaaggcattcaagcggatttcacgggacatcaaagcactccgttgaggtggtagttgccgacgatctggtacttcgtacgcagcgggtcatccaggctcgacggcagtgcggtgcgttggccggtgagttcgaactcggcgttgctcgcggcgatcagggcttcggcggcggcgatttgcgcttcggtagccgcgacggggctggggtgggtttcggcgcgttcaaacaaagccgcagccacatcgacgcgaatctgcaagtcgccgaaacggctgatcacgtaggggtcggtgctgttttcaacgtggcggcgggtgctgtccagcagttggcgcgcaaggttcagtgcagtcatgggtgaggctcctcagttccaggcgtggcgcgcaggcttcacgccgttgagcacgtagttgccgatcaggtggtatttccagcgggccgggtcgtgcagggtgtgggtgcgcgcgttgcgccagaagcggtcgaggttgtgcttgccggtgaccgagcgggtgccggccagttcgaacagtttgctgctggcgagcaaggcggtttcggcagaaaggactttggcttgggcaaccaccagtgaggcgtgggcgacgctgtcttcgccgggctcggcgagggcgcggtccacggcttcccccgctttggcgaggatggcttcggtgccgtgcacgcgccattccaggtcgccgatggcggcgatggtgaacgggtcctgccagccgtgatcctgttggctgtcgatccagggccgcgcctggcgtgcgtagattttcgcctgctccaaagcgccaacggcaataccggtatcgaccgccgcctgaatgatctgcgaaatcggaccattggcggtgggctggtcaaaagcctgatgcgcagggatcaccgcgctcaagggcacagtcacaccatcgagggtcacgccaccactggcggtggtgcgctggccgaaaccgtcccagctgtcgatcacgttcaggccgggcgcgtcacgttcgacaaacgcgataaaggcctggccgtcttcattgttgccgacggtgggcaccaggtgagcgaacagcgcgccggtgcagtagaacttctcgccgttgatttgcgcggtatcgccgtgaaagcgaatctgggtatcgaaggtgccggcgttcttgctcttggcttcggaaaaggcgttgccgaaacggtagccctggaggactttgccgaagtagtactgtttttgtgcctcggtcgcggtttgcagcaggatgtccaccacgcccaggtggttctgcgggatctgccccagggacggatcggcggcagagatcaatttgatcacctcggccacggtcacataggacacgccagcgccgccgtacgctttgggaatggtgatgccccacaggccgctggcggagaactcgtcaagctcggccactggcaggcgccgctcacggtcgcgggcgctggcctcgatggcaaagcgtgcggccaggcgcgtggcgacctcgatcgcttccgcgtccgagcggatgatatgggcagggtgttgagggtgggctgacatgggccgactccaggctccgaggggattacctgggtgattgcaggagtcgtgcctgaatgtgacagtccatgaaaccggctgattgccttgtagaaaacggagcaacacatcactgaaatcagcaaactgcctgacaagtgttgctccagcaacagtctcctgttgattaaaatgtgggactgacgcttattaaaattttaatcctcgatcgtatacacagcttctgccgagtggttaacattgttgacgatatagctggcggtagcagtcgttgcgggagaagcaaagagcgcatcaaaaagtttaaattcaagcatctggtcgatatcagtgaccgtcgcttgcgagaagaaaatccattgaccatcggtagaaacctgaacataaaccacgtccccaactgcaatccctggatacagcggtatgcagagccgtgctctgttacctgcaattgctgcacgagaaataacattgttacttgagggcacaatagagggggcagaaagcaggtcagagcgagatactagaattccgttcattaataaatcctcactaattaaagtcaaaggtgcgccctgccgtatttggtacgaatatcgattttaaaatcactgtacaaaaacaaggcaagtgaaactaaagcgcccttcaaatataaacagggaactcaaaaaagtaagctgtgaactttgacagttgacaaactaaataacgacattccgtacaaactttactgcgacgcccccatcattgcgataggcatgaggctgatggctggcaaacatgaaaaactcgcccgtaccaattgtcttgtcttcacctgccaacaccagagtcaagcaaccctcaaagacaaacagctgctcgctccagccttcaaggtctgggtccgggcagtagcgatcgccaggttcaaggcgccactcccagagttcgacttcacgccgcgccgtggccttggccagcaacaccgccttgctgccgggaatttcaccggcccaggccagctcattgatacggctatggtcacgcacatccggcgcctggatcaggtcgctgaacgccacgtccaacgcttcggccacgcggtcgagggtggacaagctgacgttcttttcgcccgcctcgatggccactagcatgcgccggctgaccccggatttttccgagagcaaggtctggctgaggtcggcggcatggcgcaggcgacggacgttctggctgacgtgctgcaggaccgaagcccggtggggattttctttgtgcactatattgctcaatgggtgggtgtgcgcagtatactgcccagcgtgcggcgcattgtgcggtccgtgcctttcccttgcaagaccgagccgccatgaccaccccgaacgcctcccctcgtttcaaccgtttcagcaaagccgagtgcatcctggtggtgatcaccatgatctggggcggcacatttttgctggtgcagcacgcaatgacggtcagcgggccgatgttttttgtcgggttgcggtttgccgccgcggcgattgtggtggggttcttttccttgcgcacgttgcgcgacctgacgctgttcgaattgaaggccggagtgtttatcggtgtggcgatcatgtttggctacgggctgcaaacgattggcttgcagaccatcttgagcagtcaatcggcgtttatcacggcgttatatgtgccgttcgtaccgctgttgcaatggctggtgcttggccgtcgcccggggttgatgccgagcatcggtattatgctggcgtttaccggcttgatgctgctgaccgggccggcgggggcttcgctgaatttcagtcccggtgaaatcgccacgttgatcggtgcggtggcaatcgcggcggagatcatcctgatcagcgcctttgccgggcaggtggacgtgcgtcgggtgaccgtggtgcaactggccacggcgtcgttgctgtcgttcctgatggtggtgccaatgggcgaggcgttgccggggttttcgtggttgctgctgttcagcgcggtgggcctgggcttgaccagtgcggtgatccaggtggcgatgaattgggcgcagcaaagtgtttcgccgacccgcgccacgttgatttatgccggtgagccggtgtgggccggcgtggtcgggcggattgccggggaacgcttcccgccgatcgcgatggtgggggcggcgttgattgtgttggcggtgattgtcagcgagatgaagaccaaggggcagaaggccctggaattgcgcgatgagagggaacaggaacagcagggataaggtccgagtacttgcagtggctgtcagatcgccatcgcgggcaagcccggctcccacaggggggggcggtgtcgcttgcccgaatcgggttacctgaaacaatgccaaatgggcgatttcggcttagcttgtaggatcctgccacatcttgccgtttggtgatcgtgaaagcggcacgtatgatgcatcccaaactcccgcagattagaagcctatgtccctgatagttctactgcttctgccgttcattggcagctgtctggcggccttgctgccgcacaatgcacgtaacaccgaatccctgctggccggccttgtggccctggtcggcaccattcaagtcgccctgctctacccccagatcgcccacggtggcgtgatccgcgaagaattcatgtggttgcccagcctcgggctgaacttcgtgctacgcatggatgggtttgcctggctgttctcgatgctggtgctgggcatcggcacgctggtgtcgctgtatgcgcgctattacatgtcgccagacgacccggtgccacgcttcttcgcgtttttcctggcgttcatgggcgccatgctcgggctggtgatctccggcaacctgatccagatcgtgttcttctgggaactgaccagcctgttctcgttcctgttgatcggctattggcaccaccgcgccgatgcacgccgtggggcgtacatggcactgatggtcaccggcgccggcggtctgtgcctgttggcgggggtgatgctgctggggcatatcgtcggcagctatgacctggaccaggtgctggcggcaggcgagcagatccgcgcgcattcgctgtacccggccatgctggccctggtgctgatcggcgccttgagcaaaagcgcgcagttccccttccacttctggctgccccacgcgatggcggcccctacgccggtgtcggcgtacctgcattcggcaacgatggtgaaggccggcgtgttcctgctggcccgcctgtggccgtcgctgtccggcagcgaagaatggttctggatcgtcggcggtgccggcgccctcaccctcctcctcggcgcttactgcgccatgttccagaatgatctcaagggcctgctggcctactccaccatcagccacctcgggctgatcaccttattgcttggcctgaacagcccgctggccgccgtcgcggcagtgttccatatcctcaaccacgccacgttcaaggcctcgctgttcatggctgcaggcatcatcgaccacgaaagcggcacgcgggacatccgcaagctcagcgggctggtgcgtttgatcccgtttaccgcgaccctggcgatggtggccagtgcgtccatggccggcgtgccgttgctcaatggcttcctgtccaaagagatgttcttcgccgaaaccgtgttcatcacctcgaccgcttgggtggagttcgccctgccgctgatcgcgaccatcgccggtacgttcagcgtggcctacgccctgcgcttcaccgtcgacgtgttcttcggcccgcccgcgaccgatctgccgcacacaccccacgaaccaccgcgctggatgcgcgcaccagtcgagttgctggtgttcacctgcctgctggtgggcatcttcccggcccaggtggtcggctcgatcctcgccgccgccgcgttgccggtggtgggtggtgtactgcccgagtacagcctggcgatctggcacggctggaacgcaccgatgatcatgagcctggtggccatgtccggcggcgtggtgctgtacctgctgctgcgcaagcaactcaagcgtggtcgcttcaaatacccgccggtgatcagctacttcaacggcaagcgcggcttcgagcgcagcctggtggtgatgatgcgcggcgtgcgcaggatcgaaaaacgcatcagcaccaagcgcctgcagacccagttgttcctgctggtgctggtggcggtggtcggcggcatgatcccgatgctcaacagtggcctcagttggggcgaccgaccgaagatcccgggttccatcgtattcgtgaccctgtggctgctggcgattgcctgtgccctcggcgccgcctggcaagccaagtaccaccggctggcggccctgaccatggtcagcgtgtgcggcctgatgacctgcgtgaccttcgtgtggttctcggcaccggacctggcgctgacccagttggtggtcgaagtggtgaccaccgtgctgatcctgctcggcctgcgctggctgccacggcggatcgaagaggtgtcgccgctgcccagctcgctgcgcaaggcgcgcatccgtcgcctgcgtgacttcctgttgtccaccgtggtgggcggcggtatggcgttgctgtcctacgcgatgctgacccgccagacgcccaacgatatctcctcgttctacttgagccgcgccctgcccgagggcggcggcagcaatgtggtgaacgtgatgctggtggacttccggggcttcgacaccctcggtgaaatcaccgtgctcggcgccgtggcgctgacagtgtacgccctgctgcggcgcttccgcccttcaaaagagagcatggagttgccgccgcaacagcgccagctggcgccggacgtggccaccgacctggtcaacccgcgccaggccagcgacaccgcgctgggcttcatgatggtgccggcggtgctggtgcgcctgctgctgccgattgcgctggtggtgtcgttctacctgttcatgcgcggccacaaccaaccgggtggcgggtttgttgccggcctggtgatgtcggtggcgtttatcctgcaatacatggtcgctggcacgcagtgggtcgaggcgcaaatgagcctgcggccgatgcgctggatgggcttcgggctgctgtcggcaaccctgaccgggctcggcgcgttgttcgccggctacccgttcctcaccactcacacctggcatttcagcctgccgctgctcggcgacatccatatcgccagcgcgctgttcttcgacgtcggcgtgtacgccatggtcgttggctcgacgctgctgatgctcactgccctcggccaccagtccgtgcgggcccataaaccgagcaaccaggccaaagtggttgccgcaacggaaggagccgcctgatggaagaagtcatcgcaattgccattggagtcctggcggcttccggcgtctggttgatcctgcgaccacggaccttccaggtggtgatgggtctgtgcctgctgtcatacggggtcaacctgttcattttcagcatgggcagcctgtttatcggcaaggagccgatcatcaaggacggcgtgccgcaagacctgctcaactacaccgatcccctgccccaggccctggtgctcacggccatcgtgatcagctttgccatgaccgcgctgttccttgtggtgctgctggcgtcacggggcctgaccggcaccgaccatgtggacggccgggagcccaaggaatgaattgggtgaatcaactgatcgtcgcaccgatcctgctgccgttgctgaccgccgcgctgatgctgatgcttggcgaaaagcgccgcccgctcaaggcgaaaatcaatctgttctccagcgtcatcggcctgggcatcgccatcctgctgctgtactggacgcaaaaaggcggcccaggctcgattggggtttacctgccgggcaactggcaagtgccgttcggcattgtgctggtggtggaccaactgtcggcgctgatgctggtgctcaccgggatcatcggcgtaagtgcgctgctgttcgccatggcccgctgggatcgcgcgggcaccagcttccacgcgctgttccagatccagatgatgggcctgtacggcgcgttcctgaccgccgacctgttcaacctgttcgtgttcttcgaagtgctgctggcggcctcctatggcctgatgctgcacggctccgggcgtgcgcgagtgtcgtcggggctgcattacatcgcgatcaacttgctggcatcgtcgctgttcctgattggcgcggcgatgatctacggcgtcaccggcacgctgaacttcgctgacctggcgctgaaaatcccactggtgccggaggctgatcgtggcctgttgcacgctggggcggcgatcctggcgacggcgttcctggccaaggccggcatgtggccgctgaacttctggctggagcccgcctactcgtcggcgagtgcgccggtggcggcgatgtttgcgatcatgaccaaggttggcgtgtacaccgtgctgcgcctgtggaccctgctgttctccagccaggccggggcgtcggcgctgtttggtggggattggctggtgtatggcggcatggcgaccatcatctgcgcggcactggcgatggtcgcggcgcagcgcctggagcgcatggccagcttgagcatcctggtgtcggcgggaattctgttgtccgcagtggggtttgcccagccaagcctgacggcgggcgcgctgttctatctggtcagttctaccttggccttgagcgcgctgttcctgctggctgaattgatcgaacggtcacgctcggccaatgacctgccgctggatgaagagatcgatgcgctgcccaaggccatggaatccctgcatccgcgccctggcgtcaacctcgatgacgagcagcaagccgtggtcggccaggtgatcccctggaccatggcgttcctcggcttgagctttattgcctgtgccctgctgattatcggcatgccgccgctctccgggtttatcggcaagctcagtctgttgagtgcgctggtcaatccgctgggcctgggcgtcagtgttgacgaaccgatccgaccggccgcctggggcttggtggcgctgctgattctctccggcctggcctcgctgattgccttcgcacgcctgggcatccagcgtttctggacccctgaggaacgcccttcgccgctgctgcgtcgctacgagtgcttgccgatcttcttcctgctgggcttgagcatcctgctgaccttcaaggccgagccgctgatgcgctacacccaggccaccgccgtcagcctgaacaacccggaacactacgtgatggcggtgatggcgacgcggccggtggcgagtcctgaagccaaggctgccgcactggaggtacagccatgaaacgactgttccctgccccgtggttgtccctggcgttgtgggtgttgtggctggtgctgaacctgtccgtcagccccggcaacctgctgctgggcgcgctgttgggctttctcgcgccgctgctgatggcgccgttgcggccgttgcccatccgtatccgccgccctggcgtgatcatccgcctgtttttcctggtgggccgcgacgtgatcgcctccaacctgcaagtggcctggggcgtgctgatgtgtagctcccgcccgccgcgttcgcgcttcatcaagatccccctggacttgcgtgatgccaacggcctggccgcgctgtcgatgatcaccacagtggtgcctggcaccatctggtcggaactggcgctggaccgcagcatcctgctcctgcatgtgtttgacctggaggatgaagcgtctttcatcgagcacttcaagtccgcctacgagcggcccctgatggagatcttcgaatgagcgccctgctcgccaatgcgatcctgttcagcctgttcctgttctccctggccatggtgctgaccctggtgcgcctgttcaaaggcccatcagcccaggaccgggtactggcgctggactacctgtacatcctggcgatgttgatgatgctgacgctgggcattcgttatgccagtgacacctactttgaagcggcgctgctgatcgcgctgttcggcttcgtgggctcgtttgccctggcgaaattcctgctgcgtggggaggtgattgaatgatgccgttatggatggaaatcgtcgtggccgtgctgctggtgctcagcagtgtatttgcattgattggcgcgatcgggttgctgcgcatgaaggacttcttccagcgcatgcacccgccggcactcgcatcgacgctgggagcgtggtgtgtggcgttggcgtcgatcatttatttttcggtgctcaagtccgggccggtgttgcacgggtggctgattccgattctgctgtcgatcaccgtgccggtgaccacgttgctgttggcgcgcacggcgttgttccgcaagcgcatggctggcgatgatgtacccgccgaagtcagcagccgccgttgatccctatagaaaacacggtcaaaactgtgggagggggcttgcccccgatggcggtggatcagtcagcttacctgtagctgacccactgctatcgggggcaagccccctcccacatttggattggcgctaggcaaaagacctgatgtgcgccgccaattccgccaacccctcatcatcggcccgcacatgatcgtgggaggagatgtacccttcatatgcctcgaagaacttgtccaccttcgaactcagcggcttgaaggtactgtcgccgccggtcccatgcatgggaaacagcttcgcatgcaggtgatccaccccatacccttccaggatcatcccggtgcgcgccacatcggaaaacgcacggtcgatctgctgtgcggttttctttgcggcgacggcgagcccggccaacacttcatccgactgtgcaaacgcatagctgccgtaatgctgcttggggatcaccacgctgaaacccggggtgttggggaagatcgataagaaggccatgtgctggtcgtcttcccacaggatgtgcgccggggaagtcttttggacgatgctgcagaaaatacacgtcattcgagtctccatcagtggttcttggtggccttcaaatagcacaacttccattacaagataggcgagccaaacctgcgaaaccgcggcatccaatcacccagaatctgcgccgacgccagcacatgatgcgcccgcccgatcaacagccggcgtggcacaacgccgatgtaccgggaatcatcgctgttgtcgcggttgtccccgagcatgaaatagctgtcggccggcaccaccagcggcccgaaactgcgcatcgctcgcaccgtcggcatgaactgcaccgtgcgctgccggttggccgccaactcgttcagcttgattcccggcaccgcatggccgggaacgatgggctcgctgatgtcctgcgcatcactgtaggtggcaggcacgccgttgacccacaacacctcatctttcatttccagggtgtcaccgggtatgccgacgatgcgcttgatcaggcgcatgccgtccttgggcgacgagaacgttaccacatcgccacgttgggggttatcgagctgggccagggaaatgtccgtgagcggcagcttgaggtcgtaggccacacgattgaccaacaccacatcgccctccagcaaggtcgggcgcatggagccggagggaatgggattccagtccgccagggaggtgcggaaaacgccgaagcacaaccagaaaatgattgcgtaacggtaacggatcaaccaacttcgcatacatcctcgcacggcagacaggggcatcagggctgtttcccagacgcccggttgtttcacgcgaggattaaatcaacattagcgtccaagcgcacaaaaaggagttttcgccatggatatcaaatgttcggtgtttatcgccgccagcgtcgatggcttcatcgcccgcccggacggtgatatcgactggttgcaccggccggagtatgaaaccgccaagttgaacggtgtgacttacgaaagtttcatcgccacggtggatgcactggtgatgggacgcaagaccctggagaaggtactgtcctttgcggagtggccctatgagggtacgccggtcattgcgctcttccatcagcctctgcaaatccctgcgcatctggagggcaaggtcgaggtcatggcaggagacgtcacctcactcgtggcaacgttagccgagcgcggcatgaagcacctctatatcgacggaggccagacgatccaggcgtttcttgaagcgggcctgatgaatgagctgatcattacgcgtatcccggttttactcgggcaagggatcccactcttcagccagatcggtcgagaacttgagcttcgccatatcggcacgcatgagtcggacaatggttttgttcaaagtcggtatcaagtgatgcaatcttcatagcggcggcagacactcacatcgcgcaagacggacagggggtcaggatgactaagcacattattgttatcggcggcgagtccaccgaagacatgcagcgtatgacgcgtatcgataaacatatcgtcgcgtcatcaggcaaaacgcaccctactgtgctctacatctctaccgccaatggcgatgaccgaatcaagatttccgatttcaccaccaaatatgaaagcgctggctgccgtgtaaccgcgctggcatttttcatttcacccttccccaacgccaatcatgtttcatcactctttgagcaagccgacattatttacgtaccaggcggaaatacccgcgcgatgttggcgatctggcgcgaatttgctgtagtggaccatctgaagaggtcctgggaaaacggcaaagtcctgtgtggtgtcagtgcaggcgccatttgctggttcgagcatgggcattccgattcagggggagtgtttgcgctggttcacggcctgggcttgctgccaggagcactgtgtccgcatttcagctcagaagcaggaagggaaacctcgtttgtcgagcttgttcagcgtgagggtatacaacctgcctacgcggtcgatgatggcgtcgctttgcatttcaaggacggcgagtatcacgagaccatctataacgacacagccaatagcgcctataaagtcagtacaaggccaccctacctagtacagatattgcgaacttcaggcgggtaagcgccgctaggaaatttccgacagcgttttaaggttttcgctcggaagatggctgcctaatcttcggtggtcgctgcaaattcagcgaccgggtttcgcagcccggttaaactctagacgcacagcgtccacctcagatagcgggcgcttttttatgcctgatgttatggcggctgtgcgcgggataccttcgggtatgccgggtgcctagagtcccggtctgcgaacctgcgtacagctgccacccgaatgtcgtttcgcagcgatgggtggtggctccaatactctaggagctttgccatgattaaagacagtccgaatccgccattagactcagccgcgtttcatactgcggctcatcgagcaattaaccactatctgaatccacctgagaaaccagagccttctactgaggaccatagtttatttactgtacgcgaaggattagacatcgagacgctgctggtcaacgcgtcggaggatcttgcctcggttcaagcgctggcaagccatttggcttttgagatcgacggcaatcctcgcagcgtggccttgggaatgtgtcggatgctggaggggatacagctaatggtggataaaacactaagcctcaaagaccatccaactcacacataaatctgaaaccgaagagttcgcaaagtgggcacggtaaaaaatgtgggagctggcttgcctgcgattgcggtgggtcagtcaacatttccggtgactgacacgccgtcatcgcaggcaagccagctcccacagtggatcgagtgaaacgttaaaccgatgtgcaaaaaaaacgccccgaaccagtcggggcgttttcattcagcgtttaccgatcaagcctgatccgccaaccgccacgtcgtcccacccttcccgtcttccaacaccacacccatcgcggtgagttggtcgcggatacggtcggattccgcccagtccttaccggcacgcgccgccaggcgcgcctggatcagcgcatccacctcagccgcatctacacgcccttcggcgccggcttgcaggaagtcctcaggcttcatttgcagaaccccaagcacactggccagctctttcaggcgcgccgccaggccggccgctgcgtcgaggtcgctctcgcgcaggcggttgatctcgcgcaccatctcgaacagcacggcgcaagcttctggggtgccgaagtcgtcgttcatcacttcggtgaagcgggccacgaaggcttcgccgccggccggcgctacggtcggcaggcctttcaacgcatggtagaaccgctccagggcgcccttggcgtccttgaggttgtcttccgagtagttgatggcgctgcggtagtggctcgataccagcaggtaacgcaccacttccgggtggtacttttccagcacgtcgcggatggtgaagaagttgttcaaggacttggacatcttctcgccattgatgcggatcatgccgcagtgcatccaggcgttggcgtaggtcttgccggtcgcggcttcgctctgggcgatttcgttttcatggtgcgggaactcgaggtcgctgccgccgccatgaatgtcgaaagtctcacccaggcagcaggtggacatcaccgagcattcgatgtgccagcccggacgcccggcgccccatggcgactcccagctcggctcgccgggcttggtggctttccacagtacgaaatcgagcgggtcctgcttggcttcgtcgacttcgatacgcgcgccgatgcgcaggtcttcgattttcttgcgcgacagcttgccgtagcccatgaacttggcgacgcggtagtacacgtcgccattgcccggcgcataggcgtaacccttgtcgatcagggtctggatcatcgcgtgcatgcccgggatatggtccgtggcacgcggttccatgtcaggcttgaggatattgaggcgggcctcgtcctcgtgcatcgcggcgatcatgcgctcggtcagcgcgtcgaacgactcgccgttttcgttggcgcggttgatgatcttgtcgtcgatgtcggtgatgttgcgcacataggtcaggtcatacccactgaaacgcaaccagcgggtcaccaggtcgaaggcaaccatgctgcggccgtggccgatgtggcagtagtcgtacacggtcatgccgcacacgtacatgcgcaccttgttgccgtccagcggcttgaagacttctttggtcttgctgagtgtgttgtagatcgttaacacgacaattcccttaagacagaatcactgaccccacgaatcacgcaaggtcacggtacggttgaataccgggcgacctggtttcgagtccttgatatccgcgcagaagtaaccttcgcgctcgaactggaaacggtcttccggctgtgcgtcgccaagcgatggctcggcacgacaacccgtaagtacttgcagggagtcagggttgatgttgtcgaggaaactcgcgctgtcttcggccttttcagggttcggcgagcggaacaggcgatcgtacagacgcacttcgcactcgatgctggcggccgccggcacccagtggatcacgcccttgaccttgcggccttcggggttcttgcccagggtgtccgggtcgtacgagcaacgcagttcgacgatgttgccatcggcgtccttgatcgcttcgtcggcacggatcacgtagctgccacgcaggcgcacttcgccgttcggctccaggcgtttgtagccttttggcggctcttccatgaagtcatcgcggtcgatgtagatttcacgggcgaacggcagcttgcgcacgccgagttcttctttctgcggatgacgcggcagctcgaggttatcgactttgtcttccgggtagttggtgatcacgactttcaacggacgcagcacgcacatggcgcgtggggcgttggcgtcgaggtcctggcggatgctgaactcaagcatgccgtagtcgaccacgccgtcggaacggttggtgccgaccatctcgcagaagttgcggatcgacgcaggcgtgtagccacggcgacggaagcccgacagcgtcgacatgcgtgggtcatcccagccatgcacatgcttttcatcaaccagttgcttgagcttgcgcttgctggtgatggtgtagttcaggttcaggcggctgaactcgtactgacgagggtgcgccggcaccggcaggctgtcgaggaaccattcgtacagcgggcgatggctttcgaactccagggtgcagatcgagtgggtgatgccttcgatggcgtccgactgaccgtgggtaaagtcgtagttcgggtagatgcaccacttgtcgcccgtctggtggtgatgggcgtggcggatgcggtacatgatcgggtcgcgcaggttcatgttcggcgaggccatgtcgatcttggcgcgcagtacgcgggcgccgtccgggaactcaccggcgcgcatgcgggcgaaccagtcgaggttctcttcgaccgaacggtcacggaacgggctgttcttgcccggctcggtcaggctgccacggtattccttggcctgctccggggtcaggtcgtcgacgtaggccttgccggccttgatcagctcgacggcccagtcgtgcagttggtcgaagtactgcgaggcatagcgcacttcaccggaccattcaaagcccagccatttcacgtcgctttcgatggcgtcgatgtattcctggtcttccttggccgggttggtgtcgtcgaaacgcaggtgcgtgacgccgccgaattcctgggccaggccgaagttcacacagatcgacttggcgtgaccgatgtgcaggtagccgttgggctctggcgggaagcgggtgacgatctgcgtgtgcttgcccgaatccaggtccgcctggatgatcgggcgcaggaaattgaccgggacggcaggtccggccttggaattcgaggtagggtcgacagtgggcttgctcataggatccttgaacagacaagtacgtggccgggctaggccgacaaaacaaagggcttatcatagctgatgctgtcaagccgctgacagggttgcggtgcatttaacgcaccagtggtaaaaaaccacctcgaaattcctgcaggtcacgctaaactgcgcgccttggccgcagtttcgccataccggtcgtggtgcccaggcacccaaatccacgaattccctgaaaagagtagtgaacatgactcaagtcaaactgaccaccaaccacggtgacatcgtcatcgagctgaacgccgagaaagcgccgatcaccgtcgccaacttcatcgagtacgtgaacgccggccactacgaaaacaccgttttccaccgtgtcatcggcaacttcatgatccagggcggcggtttcgagcctggcatgaaagaaaagaaagacaagcgcccaagcatccagaacgaagcggacaacggcctttccaacgacaagtacaccgtcgccatggcccgtaccatggagccgcattcagcctccgcgcagttcttcatcaacgtggccgacaacgccttcctgaaccacagcggcaagaacgtgcagggctggggctacgcggtattcggtaaagtcaccgaaggccaggacgtcgtcgacaagatcaaaggcgtgcagaccaccggtaaagccggtcaccaggatgttccggtagaagacgtgatcgtcgaaaaagccgagatcgttgggtgatattgctgatttcagatttgcatctggaagaggagcgcccggacattacccgggcgtttctggatctgctccacggccgcgcccgtggcgcccaggcgttgtacattctgggggacttcttcgaagcctggattggcgacgatgggatgacacccttccaacgctccatttgcgcagccctgcgcgaactgagcgacagcggcaccccgatttttatcatgcacggcaaccgcgatttcctgatcggcaaggcgttctgcaaagccgccggcgccagcttgctcaaggacccgagtgtcgtgcagctgcatggcgagcccgtgctgttgatgcacggcgacagcctctgtacccgcgacgtcggctatatgaagctgcggcgcatcctgcgtaacccgatcgtgctgtttatcctgcgccacctgcccttgggcacacgccacaagctggcgcgcaagctgcgcagtgaaagccgtgcgcagacacgcatgaaggctaacgacatcgtcgatgtaacgcccgaggaagtgccacgggtgatgcagctgttcggcgtgcgcaccctggtccacggccacacccaccgccccgccattcacaagttgcagattggcgaccaggcggccaagcggattgtgctgggggattgggacaagcagggctgggcgttgcaggtggatgagcaagggtttcagttggcggcgtttgattttgtgaacccgcaactggcactgcccggcgcataaaaaatgtgggaggggcggtgcgacgattcgacttgcccccgatnnnnnnnnnnnnnnnnnnnnnnnnnnnnnnnnnnnnnnnnnnatcgggggcaagtcgaatcgtcgcaccgcccctcccacattgaattgtatttcgatctttactgatcagtgcccggaagctgccggccccgctttggcggtaaacggcggcttcgccagccataccagcagcatcaaccccatgaacatccaccccagcaacgtgaagtaatccacggtggacatcatgtacgcctggctggtgaggatctggtccagctgcgtgtaggccttctgccctgccccaccgagcgcctgcaaggcatcgcgggtcgccgagtcgtaggtggtcatgttctcgctcatgtacgcatggtgctggtccgcccggcgaatccagatccaggtggtcagcgacgccgcgaagctgccgcccagggtacgcaggaacgtggccaggcccgcgccgtcggcaatctggtgcggcggcaggtcggacatcaagatgctcaaggtcggcatgaagaacagcgccacgccaatccccatgaacagctgcaccagggcgatgtgctggaagtccacctcattggtgaagcctgcgcgcatgaagcagctcaagccaatcgccaggaaggccaggcccgccagcaggcgcaggtcgaacttgtgcgcgtacttgcccacgaacggcgacatcagcaccggcaaaataccaatcggcgccaccgccaggcccgcccaggtcgcggtgtagcccatctgggtctgcaaccactgcggcaggatcaggttgatgccgaagaagcctgcgtaccccaggatcaacacgatggtgccgatgcggaagttgcggtaggcaaacagcttcaggttgaccaccgggtgtttgtcggtgagttcccagatgatgaacaccgccagggcaatcaccgaaatcgccgcgcccacgataatgaagttggattcgaaccagtccaggtcattgcccttgtcgagaatgatctgcaaggcgcccacgccgacgatcaagctcagcaacccgacgtaatccatcggctgataactggtctgcaccggacgtttcttcaactgcgaacgcaccaccatcaccgcaaagataccgatgggcacgttgatgaagaaaatccacggccagctataactgtcggtaatccagccgccgaggatcggcccggcaatcggcgccaccaccgtgaccatcgccagcaacgccagggccatgccgcgcctcgccggcgggtacacggcgatcagcagtgtctgagtcatcgggtacaacggcccggccaccaggccttgtatgacgcgaaaagcgatcagctcgggcatcgacgtggaaataccacacaggaacgaggccagtacaaacagcatcgtcgcccacaagaacagcttcacctcgccaaaccgccggctcagccaaccggtgagcggcaaggcaattgcgttgctcaccgcaaacgaggtgatgacccaggtgccctgctccgaactcacgcccaggttgccggaaatggtcggcaacgccacgttggcgatggtggtgtcgagcacctgcataaaggttgccagcgacaggccaatggtggccatcaacaggctgggtggcgtgaaggaggcgttattgctcatcagcgttgcacagccttgggcgcggcgaggctgttgtcatggatcaactgggtgatcatggcgtcggcctcggcgagttggcggtcatacacgttggtgctgaacgaggctttctgcggcgcctgttgcgccagtaccgggccgctctggtcatgcaggtcgaccttgaccagggtgctcaagcccacgcgcagcgggtgcttggccagttcttcggcattgatgtggatacgcaccggcacccgttgcacgatcttgatccagttacccgtggcgttctgcgccggcagcagcgcaaacgcgctgccggtaccggcgccgaggctgtcgatggtgccgctgaatttcacgtcgctgccgtagatgtccgactcgatgtccaccggctggccaatgcgcatgtcacgcagttgggtttccttgaagttggcgtcgatccacagctggttcagcgggatcaccgccatcaaggcggtgcccggttgtacgcgctggcccaattgcacggtgcgcttggccacatagccggtgaccggtgcgatcaaggtgctgcgcgcattggccaggtaggcctggcgcagttgcgcggcggcagcctgcacgtccgggtgggagctgatcacggtgtcatccaccagcgcgttggtggttttcagttgctgctcaaggttggtcagggcgtttttcgcggcagtcaggctgtcacgggcgtgggacagttcttcctgggaaatcgccccgccctgggccagggttttacgtcggttgaagttgtcctgggcagtctgcacgtcggctttctgcgcattgacctgggccttcatgccgtcgacgttgctgtacaaaccacgcacttggcgcacggtgcgcgccaggttggcctgggcactttgcaggcccactgcggcatcgttagggtcaaagttgatcagcacctggccttcgtggaccaggtcgccatcgtcggcgccgatgctgaccacggtgccggtgaccagcggggtgatttccaccacgttgccgttcacgtaggcgtcgtcggtgctttcgctgaagcggccgtagagctcgtaccagccccacacgccgaccacgacgaggatgacgatcagcgccaggccgatcagcatcactttgcgtttgcgtgggttgttgtctttgggttgttcggttgcgttggtgttttcggcagtggccatgacaaatacctcaaattattccgtgcgtgtagctggggtggccgctgccacgttgtcggcgctgtagccgccgcccagggcctgcatcagttgaatcgacagatcgatctgcgcggcattcagggtcgccagctgacgctgggcctgcagcaattgctgctcgatgctgagcacatccaggtagttaccgatcccggagctgtagcgctgcacgccggtgtcgtaggactgctgggcaatgtccgcggcatgttgctgggcctggatctgccgaccggtgtcgcgcagttgcgaaagggtgttgccgatatcgcccagggcttgcaccagggttttgttgtattgcgccacggccaggtcgtagtcggcgtcgcgggcgtcgaggtcggcacgcaggcggccgccgtcgaagatcggcagcgagatcgtcggcgcaatgttgaagaagcggctggccgagccaaacatcgcatcgcccagtaacgactcggccccggcgctcgcgctcaggttgaggttggggtagaagcgcgtcttgctggcgtcgatattgcggcccgccgattcgacccgccagcgtgcggcgatcaggtccgggcggcggcccagcagctcggccggcagcaccgagggcacggcgacagcgctgggtttcagcacgttgggccgggccagttcactgccacggtccgggcctttgccgagcagcacggccagggcgatcttggcgctttgcagttgtttctctgcgtcgatcagttgcgactgagagctggcttccaggctttcggtctgctggtactggtactggctgtcgatacccgaattcagccggcgtttgctcaggtcgagcatctgccgggtacgcttgaggtcatcgttggccaggtcgcgcacgatatgggcctggcccaggtcgctgtaggccttggccacgttggcggccagggtcaggcgcgcggcctgctggtcgacctgggcggcacgcgcttcgcccaacgcggcttcccaggcagcacgctggccgccccagagatcgaaggtgtagttgaagctggcgccgatattgcgcacggtcgagtaggcatcgccctgcccgcgtgggtcctggtctttggccaggcgtgagcggctcacaccggcgctggcatccagggtcggcaggcgcgctgcgtcggcggcgtaggcggcggcttcggcctggtgggcacgggcgctggccacttgcatgtcgggactgttttgcagggcttcccgaatcaagccatcaagctgcgggtcaccgaggcttttccaccagtcggcggtcggccaggcagcgctcgacagggtcacgccgctcaaggttttaccggtttgcaatgtgctggcgtcgaggcgtttgccttgggtgtcgaggccgctgtagttggcgcaaccggccatgttcatggccaccagcaccaggctaagtgcgcgtatgttcattctttacctacccgctggatgacgatggcgtcaccggcagctatcagaattttcttgaggatccgctccagggtctgcaactcgccgggctccagggcgccggccagttcgttcatcgactgggcgccgatgtgcggcagcatgtccgccaggcgctggccgtcttcggtgagcaccaagcgcacctggcgccggtcctgctcggaacgctggcgtgccagcaatcccttttgttccaggcggtcgagcatgcgggtcatggagccgctgtccagggacaggttgcggcacagctccgccggggtatccacatcgaactgggcgatgatgatcaacaccttgaactgcgcagcggtcacgccgtgcggctccatatgggtgtcgataatgcggtccttgagcagcgccgcgcggcccaggagcaggccgaggtggcagttgcgaaaactgtcaggagtgaagtgagacatcggaagtcaccttattactgcctaggcagtgaatgtgtgacaagatgttactgcttaggcagcgaatgtcaaatggaattattagcttgcttggtagttggcggatgagtggtggggttctaaggattgcctgatggggtgtgacgccttcgctgagtaatctgcgtagccttttggccagtcgacactctccttcccatgacttctttaaaacagtttactcgcctcgcggtcatcaccctggcgggcgcgccagccgcttttgcggctaattgcacagccaccatcaacaccaacgaagcccttaatttcggtgcaagtctggccagtggcagcctgacagttcccgctgatacgcccgacggcaccgtgatttaccaggacacggtgcaatccgctcaaaacagctggagatgcacgggctcttcgcaatacggcctggtgatgaaccctacgctaggctcggtcaccagcggctcgacctaccctatcggcaagaccgggctttcgttccgcgtctggatcgacactctgagtcgctatgagactgcaccgtttacgctcaagccggatggttacggcatcaacccaggctcggtgcgcctggaaatcgtcaaatcaggtacgctggcgccgcaggtcaagatagcggccggaaacctgggcagcttgaaagccgacgacctgttcatcagcaagtacaacctgaccaacccgctggtgctgaacgccgcctcctgccagaccccttccgtccccgtcgccatgggtgacgactatcagctctgggaatttcgcgacgcaggcgcaacccctcgcactgtccgcttcaacatcggcctgaaccagtgccagaccggtatcaacaaagtcagctattcactcaaagccaccacgcccgtcatcgacgcggccagaggtgtggtggcgctcaacggcggctccaccgccaaaggcatcggcctgcaattgatggatgatgccgggcaacccatcgcgtttgataccacctactccttcagcggtttcaccaccacgggcgccaacttcaagatcccgttgtcggcctcgtattaccgcttgcccaccggcaacgtcgaggccggcagcgccaacaccgaagtcacctttatcgtgaactacctgtagcaaactaaggatcgtctgatttttcctacgcccggccacgcctagagtgccgggatgcgattaaagaactatctccaccagatcagccccgtcctgtccacgccccatgccgcacgccgcttgttgcgcatttttgcgctggtgctgctggtgggcatgctgggcggtgtgtacagcttcctgctgtttacgttcaacaacgagatctctcagcggcgcagctacatgagcagcgccatcgccgaggcccatacctttttcaccacccgtgaagccctgctggaaagcctcagcctgtcggccacacgcaaggccgaatcgaacctggcgatgaacgatgaggaaatccgcctgttgctcggcaaaatcccgggtaagcaatggagcatctggctgacccagcgcatgcgcgacttcctgaaggccaagcagctcaacctgctgtatgtcggcaccgatgcccaggtgctgcggctgtacgatgcgggtcccgcggccgccggctttcccgcgtccatgctggcgcaactcaatgccctcaagcagcagaaaaccctgcaggaactctggctgactcacaccgacggtggccattcgcagctgtacatctttatccgcctggatgaacgcgacctgaactccggctggctcggcctggagatggatgaccgtgaagtctccaactccttgagtgaccacagcgccggcgagttcaccatgttcaatgcccagggcatgcctctgttcagcaacagccgcaacccgccgcccgggcagaacctgccgcacctgcgccagcaggacttcttcggctttgtcggcgacggctggctgcccgagcaattggtgttgcgcaaacaactgaagtcgtcggactggcagctcacctactccatcgacctgcgcgcggtgctctgggcgctatggccgcagatgctcggcgccctgctgttctgcctgctgaccatcagcctggtgggcctgctgacccgccgcctggaacaccgcttcatcacccccgccatccatcgtatccaggcgctggtggaaagcgagctgttcagccgcgacgtgatccagaccgcccccgtggccctgtgcgtgctgcggcgcaccgacggcgaagtggtactggaaaacaccctggcccaacaatggctcagccacgccggcgcagagctggggccgggctggattcgtgacgccttcgatacggacaccccctgccttaccgactacttcgagactgccgacggtcgccacctgtacctgagctgtgcacccacccgctacaagggggaagacgtgttgctctgcgccttcagtgatatcagcgcacgcacccagatcgaagcggcgctggaacaggcgcgccaatctgccgatgccgccaacgaagccaagacactgttcctggcgaccatgagccacgaaatccgcacgccgctgtacggcgtgctcggcaccttggagttgctcgcccggacccgcctggatgcccagcagaaaagctacctgcatgccatcgaaggttcctcggcgacgctgctgcaactgatttgcgatgtgctcgacgtgtcaaagatcgaagccggtcaattggccctggagttgagtgagttctgtgtgcccagcctggtgcaggaagtggtgcagggttacgccgcagcggcgcagagcaagggcttgcagctgtacgcgtgcctcgacccgcaactgccgtcgcgcctgatcggcgacgccagccgcctgcgccagatcctcaacaacctgctgagcaacgcggtcaagttcaccgactccggacgcgtggtactgcgggtcaaaaagctcagccgtgaaggcgaacgggcgtgcctgcaatggcaagtctcggacaccggtaaaggcatcgcccaggaagaccaggcgctgatcttcgagccgttctaccagaccgaaggcaacccccatgtgatcgccggcaccggcctcggcctgcccatttgcctgcgcctgacccacttgatgaacggcaccctgcgcatggtcagcgagccggggctgggcagcagtttttccctgaccgtgccgctggagcaacccactggtatcgcgccgtcgctgctggcgcaggaggtggtgtatgtgctctcgcctgtgcgcgaactggccgacagcctctgcggctggctgcggcgctggggcgcccgcgcgcaggtcggcccgccgtccagcgccgagctggccccacccgcggtgctgctggaactggttgagcgcagcctggacacgccctggcacggcccacgggtcctcgccagcatcgatggcgcccacgagccgcagttcagcgaagagggctggcaggtcaacctcaacgacctgaacgcgatccaccaggcggttcgccacgcccagaacggccaggccgcgccggcccaggcacgttgcgaacggcgcgacctgcaccccttgcacctgcatatcctggtggccgaggacaatgtgatcaaccagttgatcctgcgcgaccagcttgaagaactcggctgcaccgtagaattggccagcgacggtgaagaggccttgtcgcgctggcacgaaggcgccttcgacatcgtccttaccgacgtcaacatgcccaggctcaatggctacgaactggccgaagccttgcgacgcctgggctgcaacaccccgatcatcggcgccaccgccaacgccctgcgcggtgaagatgccttgtgcctggcggccggcatgaatcactgcctggtcaaacccttcacactgcgagccttgttcactgccctggctccctacgcacgagccacccatgaagccctgtagcattttgatcgttgaagaccacccgtttcagcacctgtatttgcagaacctgttcagcgagttgggcgattttgacgtggtctgcgccagggacggtgaagccgcgctggcctgcctgaaacaacgcgacttcgacctggtgctcactgacttgctgatgcctggcatggacggcgtgcaatttatccagagcctggccgctcaaccctcgcggcccgcgctggcgatcatgagtgccgcatcacgccgcatgctgatgggtgcgagcctggtggcgagcaacttgcaagtgaaggtgatcgggttgatttccaagccggtgaatgccgccgccctgcgctgcctgatcgaccagttgcaggcgctgcgccaagtcgcaccggcccagacccagcccggcatcgattgccaaagcctgatggacgccctggacaacggtgaactgcacgcctggttccaacccaagaaagccctgaacaatggtcgcatcgtcgcggcagaagccctggtgcgctgggtgcaccccgagcatggcctgttgctgcccggcgtattcctgccggcattgatcgcctgccacctggaagaacgcctgttgtggtgcgtgttgaaacaggcgatggccgcccaagccatgtggcgccaacacggctatgacatcccggtgtcgatcaacctgcccacgcacctgctcaacagccacgacctgcccgaccgcatcctcgcgttcgtgctggaacaccagggtttgcccgcacgcctgtgtttcgagctgatggagtgctcggtgcccgatgacatcagcaatttctacgccggcgcctgccgcttgcgcatcaagggattcggcttgtcccaggacgatttcggcaagggctacagctcgtacatgaacctggtgtcagcgccgttcaccgaggtgaagatcgaccgtgcgctagtgcagggctgcaacgccaacgaagaattggcccaggccctcaccagcatcgtcagcctggggcgtcaattgggcttgatcgtggtggccgaaggtgtagaaaccgcgcaagaacttgcgctgttgcgtaagatcgactgcactcaggtccagggtttcctgatctcccacgccgtctctgcggatcagttccagcaattgctgacccacgacgggccggcgagcgcctattgacccggctgccgggtgtggaacaacaccgttagcttgcgaggtcaccgcgtcatgcatcaccccaatgccttcctggagaaactcaccagcagttcactgcgcctgaacaaaggcttgctggtactgggcgcattggcggtgctgctgctgggtatcagctacctgggagtgcagcgcatggtcaaggagcagcatgaaaccctgcaattccacttcgcccggctgatggaaaatatccacgagcaggaagccttcctgcgcgatgtctcgcggggcagtctccagggcgaactcaacccttcggccctgctcccacccgttgtgcaaaagccgctgcccgaagaagggccgaatatctatgagggtcgcgggctaccgttttccctgccctacagcttgaaaatcaacccggacaagatcaccaccgcccaataccccaaggtgttcgctctcggcacctacttgtcggcttactacagcgcgttctgggccgcctcccactatcagtcgccccaggtgatggtgatcaacggcccggacaacttcgacatcagcgtgcccgccaccggccggctgcgcgatggcggccaggtgccggtcggcgcgctgctggacgtgctgacccagttgaacgcgcgcctgcacgcacagaattcgtcgctggcggatcatcaggtgcactgggaaccctacgaccccacgcccgatgacaacgctgcgcccgtgctgctgggctatgtcgacatcaacctggcctcgaccgcgctggccatcgacggcgccaacacctgggtggtggtggcttcgctgctggacctggccaaggtgaataacatcgagcgcttgatgcagtggtcgatctacgacaacttcaccttgatcacccctgccggggttgtcctgaccggtgcagtgaagcccggccaagtgttggccgagggcgtaaatgtcacccgcgacggcctggtgttcaaactcaccagccagggcgagcaggcgtggacggcgatctacgtgatcagcctgcaacgcttcctcgactacgcgctgtggccattgctgtgtctgctggccgtggtgctggcgatgctgggctgcggccgcgcgctcaaccgttggtacacggcgcgggtggtgttgcccgcccatcaggcccacgccagcatcgctgagagcgaggcgttcagccgtgcggtcatcgacactgcgccgaccggcctgtgcgtgatccgccgcagcgatcaccatgtgctcctgcaaaaccaacgtgctcagcaatggcaggacgcacgcgccttgttcgacttgctcaaacagcagccgcacaccacgccgggccaggccgaccttgaaagtggcggccgtcacctgcacgtggcgttcgtgcccacgcgttaccagggccaagacgcgtggttgtgcgcggtgcacgatgtcactcggcatatcgaagatgccgccgccctggaagaagcgcgccaggccgccgattcagcgaaccaggccaagagccgcttcctcgcgaccatgagccatgaaatccgcacaccgctgtatggtgtgctcggcaccttggagctgctcggcctgacctccctcgcgccacgccagcaggattacctgcagaccatccagcgctcgtccacctccctgttccaactgatcagcgatgtgctggatgtgtcgaagatcgaagccgggcaaatgaccctcgaactccaggacttctgtccgctggaactgaccgaagacagcgtgcgcacctacagcgccttcgcccgcgccaagggcttgcagttgtatgcctgcatcgacgcgaatctgccggaccgactgcgcggcgacccgcagcgtatccgccagatcctcaacaacctgctgagcaacgcgatcaaattcaccgattacggccgcgtggtgctgcgtctgcgtgtcctgcaaaccagcgatgatcaggtgagcctgcaatggcaggtcagtgactccggcgtgggaatttcccaggcgcagcaacaccagctgttcgaccccttctaccaggccgaagatgccaccagccaggccggtgccggcctgggcctggcgatctgcaaatggctgtgcgaactgatgcacggccagctgaatgtggtgagtgaacccggcctgggcagcagctttaccttgcaggtcgcattgcaggtcgttcccggcagcctcaccgattgcccgacgttcagccccggcctgccgcctgtctacgtacgggcacaggaacccgaacgggcgcagcacctgatcaactggctcaatcgcctggggctgtccagccgtgcgctgtcagccgagatgccggccaacgcgctgctggtggatttcgcccaggacctggcatggcccggcccgcgcatcatcgcctccgagggcgggcctgacccggcgcaaccgtgcggtgccgactggagcgtcgatgccgacaatgcgcgcgccattgcctgggcgatccaccgggcgcagcatggcgccgaagccggcccacaccgcgtaccgtccgccaaggcgcagccactcaacctgcgggtgctggtggccgaagacaatgtgatcaacgcggccattatcaaagaacaattggaagccctgggttgccaggtggtcgtggctggcaacggcaaacaggcgctgatgcagtggctgccgggacgcttcgacctagtgctgaccgacgtgaatatgccggtgatgaacggctaccaactgaccgaagccttgcgccgacaggacaccacgctgccgattatcggggtgaccgccaatgccctgcgcgaagagggcgagcactgtgccgccgtcggcatgaacgcgtggatggtcaagccgctgagcctcgccgccttgcgggcgcagttggaacaacactgcaaggtcgaaatgccggctgtcgtcgagatgccgccgttgtcacccaggatgcgtgagctgtttgtcaccacgttgcgccatgacgtacagaccaccttgaccgcgctggacaatcaggacgccaatggcgcggcgcaacaactgcacagcatggccggcgccctgggtgcggtgcagctcggtgacctggccagcgcctttgtcgcgctggaactgcgcctgaccggcatggccgtcacgccggccctggccttggaagtacgacagcacctggcgcggctcagcgcattgctcgacactcttgaataacttcactctggataaaaaacccatggaaaccctcaacgtagtcatcgcagacgatcaccccatcgtgctggtcggggtgcgggaactggtcgaacgtgatgagcgctttcgcgtggtgggcgaagccgtgtgctccaacgaactggtgaagttgctggaaaacaccgaggtggacctggtgatcaccgatttcaacatgccggcggactcgccctacggcgatggcctgaagttggtggagtacctggttcggcacttccccaaagtgcgcgtgctggtgctgaccatgatctccaacccgctgatcctcacgcggttgcaggagctgggtgtactcgccgtgatccagaaaaaccagctgcacgtggaaatccaggctgcgctcaaggccatcgcgcgcggcaacccgattcgcagcaaggggccgcagccgacctcggtgctggagtcatttgatctcgaccagcgcttcacccggttatcgcccaaggagcacgagattctgcggctgtttgtctccgggcaaagtgtcaacgagattgcccgtgggttgaaccgcagcgccaaaaccatcagcacgcaaaaagtcgcggccatgcgcaagttggaagtcagcagtgaccaggacttgctggcttattgcatagagcgcaacttgtttaactaacacccacttctagggatcgtctgatgtccccccccaaggcctgcgccttattgtgttgttttaaccccaagcatggaaaaacaacatgaaacagctctctcgcgcactcttggctctgtcggtatttgccgcagttaatacatttgccgccggtgaacccaccgcaccaaccaaagccggtagcggcaccattagtttcaccggcagtatcaacaatgatgcctgttccgttgaagggattggcctgaacaaaaccatttcgatcaacatgggcgaagtgtcgatcaaggacatgggcaccgcgaccgcgccaaaaggcagcggtaccctgagcgccgagaacttcgacatgaagatcagctgcaacgccggcaccaaggtggcaatgatcttcgaaccgaccaaaggcgcaggttcgggcatcgtcgccggcaccaaagtgctgaagctgatcgacggcctgggcgccgccaagaacgtcggtatcgccctgctggacagcaacggtgcgttgatcgacctgagctcgccgaccaccgcgaagatcgaaaacaccctgcaagacagcaacaccacgctgaaattctcggccgcctacgtcaccacagccgacgctgcgactgccgtagccggtcgcggcgacgccaccctgccgttcaccctgcaatacgaataaccccagcgtcgcggggccttcgggcctcgcacactcttcgaacgtagcggtagccatcatgttatttcgtcattctctatccctctgcgcgggcctgctgggcctgttcgcggtcagccaggccacggccggcatttcgttgagcagcacacggctggtgttcgacggccagcataaagaagccggtatcacggtgcgtaacaacggtgaagacgtgctgatccagtcctgggtcgataccgacactgacagcacggtgccgtttgccgtgaccccaccgctggcgcgggtcacggccaatgagcaacagctgttgcgggtgatttatgccggcgcgggcctgcccaccgaccgagagtcggtggtgtggctcaacgtacaggaagtccccaaggcatcgaaaacccagaacaccttgcagcttgccgtgcgccagcgcatcaaggtgttctttcgccccgccggcttgaacaacaacgcttacctggcaccgaccgaactgctttggcagttggccgagcacaacggcaagcacgtgctgcgggttaccaacccgggggtttatcacgtgtcgattgccgacattaccctgcaagccggtgccgtcagtgaacacccgttcgattcaatgatgattgcgccgggtgaactaaaagagttcaaccttaaacaacttaattccagccagccggcacgcttgatattcggcagcattaatgactatggcgcacaagaccgttattccacgcaactggttaacggcgcgccaacttcagccagtttgaacacagaatcaccataacgcgcctgccgttcgcgcagccgcactttcactgtatttctcttcgctccgttagttcgtatcggaggtgatatagggttcctgcatgtttttattcaagcgcgatggattggcgccgttattgattgccctgggcttcacttcagtgtgccaggccgatggcgacgaacaattcaatacttcgtttttgcaaggtgcggcggctgacgtcgacttgcacacactgctcgccagcaacagcgtgctgcccggcaattaccgggttgacctgtacggcaatgaaaccctggtgggtcggcgagatatcgactttcgccgcaacccgcaaaacggcaaggtcgaggcctgcctgaccctggagatgctgcagcaagtgggcgtcgatatcggcgcattacaagccagcggcaagctcgtcgataccgacccgaatgcctgcctggacctgcccaccttgatcgagcatgccagcgtgcgctacgacgtaccgcgcctgcgcctgctggtcagcgtgccgcaacgcgccatggaacgcgggcggcgtggctacgtcgaccctgcgctgtgggacgaaggcgtgcccgcggccttcgtcaactaccaactgagcagcaaccgcaacagcaccgatgccgataccacgctctcgaacaacctgggcctgcgcaacggcatcaacctgggcgcgtggcgcctgcgcaacgagtcgaacttcaacagcagcaccgaccgccccagtacgttcaagagcaaccgcacctacctgcaacatgacgtgacggccttgaagggccagttcagtgccggggatattttctcggacaccgacctgttcgacagcgtgcgctatcgcggcctcaagctggcgtccgacgatggcatgcgtgccgacagcgagcgtggctacgcgccgatcatccgtggcattgcgcaaacgagcgccacggtggaaatccgccagaacaattacatcctctacaccgccaacgtgccaccgggcccgttcgagatcagcgacatttaccccagcggctccaacggcgacctggaagtgacggtgatcgaggctgacggccgtcgccgggtcacggtgcaggcgttttccagcctgccgatcatggtgcgcgaaggccagttgaaatacagcctctccgccggccagtacaacagcaatgacgacgggcaagaaaacccgcagtttgtcagcagcaccctggcctatggcatcagcagcaacctgtcggggatcgtcggcgtccaggccacgcaggacttccaggcgttgtccgtgggggcaggacgcaacacgtcgatcggcgcggtatcgctggatgtgacccactccgtcagccgcaccttcggccagcaggtcacgggtaacagcgtgcgcgcgttgtatgccaagacctttaccggcaccgacaccaacttcaccttggcggcctatcggtattcgaccgagggctatcggaccctcaccgaccacgtcgaggaactcagcaatgagggccagaaacgcaccggcaactccaagacccgcaccgacctgaccatcaaccagagcctgggccgcaaccagcagttcggcagtgtctatgtgaatgccagcgaccagcgctactggggacgcggcggctcgcaaagtctgtcggcgggctacagcaactactggggcgacgtgagctacaacctcagcgccacgcatacccaggacgtgggcaactacggggcatcgaacaacgacacgctgatcaacctgtccgtgtcctttccgctgggttcaaagccgcgcgcgccgagggcattcatgtcggccagcacgcaaaaaggcagtgactccacgcaactgggcgtcaacggctacctgaccgaaaacagcgacacctattactcgctgcaagccggtaacagcagcacgggcggtagcaccggttcggccaacctcagcacccgcacctcgctgatggacatcagcggcggctacagccagggccgagggtacagcgcgcagaacctcaacgtggcggggtcggtggtagcccacgcaggcggtatcaacctgggccagaccgtgggcgagacctttgcgctggcgcacgtcgacggcgtgcagggtgtgaagatcggcagcttctccggggcaaagaccggccgtaacggctatgcggtgatccccaatgcgcaaccctaccgcgtgaactggatcagcctggacacccgtgacctgggcgctgacattgaaatcgataacgccacccagcaggtcgtgcctcgccgtggggccgtggtagtggcccgctataccagcaagagcgggcggcgtgtgcagttcgcgttgttcgacgcgcatcacaagcccatcccgtttggtgcgtcactggagagtgttgcgggcaagcagatcgcgatgtccgaccctagtggcaaggcattggcattgatcgaagaggatgccggtacgctggtgatcaagtggggtgagcagcactgccaggcgccgtatacgctgggcgagcgcaacaaggcgctgaactatgagcaggtagacctgacctgcttgccacaacgctaaaaacaccagagaacccatgtgggagggggcttgcccccgattggggtgtatcagccaacttatctgtggccgacccaccgcaatcgggggcaagccccctcccacatttctgtacctgtgtggcttagaaatcgcgtttatagaagatatccaatgagctggccacaccgctcgccacttccaggtacaccttcttgctcaacaggtagcgcaaggcaatggtgctggccggttcgaacacgcctaccccataccgcaggctgagtttctcggtgatcttgccgctggccaccacggcggtggtgttgccgctgccctgggtgtcgagttcgaagtcctggatgcccaggttcttcgccaggtccgaggtgacccccgcgctgcccatcaagccgaggcccagcgcagcctgggccagcatgttgttgtcttcaccggtggtgctcagcggacgccccagcaccaggtaggacagcgcttgttcctggctcatggccggttcggagaagatttgcgtggtgggctgttccgcgctgccgctgaggcggatacccgcgaccacatcgccggtcttgcggatcgcttcaatatccaggaacggttgatccaacggcccggcgaacaacagccgcgcacgccgcacatcgagcttctggccgtaggcgcggtagcggccgtcgttgagccatagctcgcctcgggtgtcgaggttgtcgccgatgtgcacctggccctggaccttggcggtgaggccgaagccggagaagttgagcttgtcttcgcccacaaccacgttgatatccatggccattgccatcggcggtttgccctcctcggtctggctgccgatgatcaccgtgtcatccgagaccttgaccgtcgacggtggcagctcgcgcacggtgatgtcgccgcgtgggatatgcacgttgccggcgatggccaatttgtcgttcttcaggctgattttcaggtccggtgctacttccagcaccgcgtaaggttcgaccgtgaccggcaactgcgagccttgcaaactgaggtccaccaccagcgccttaccccagtcgacctgccccttgaggctgccctgcccggccttgccactgcgccaggcgccgttgagctgcacactttcgccggcaatcagcgcctgcacattcaggccttccaggctgatgggcagttccggaccggagatctcaccgcccaccaggttgacgttgccgttgacctggggcgccagcaagccgccggacagacggccgttgccgttgagcttgccggtgagtttctccaccatcggcacaaacggccgtgctacggcaaggtcgaggccgacgaggctaaagttgccggttatgggtttgttcttgggtaacgggttgatctgcgcctgcaacaacagttcgccgagcttgccgccctggaagttgagctgagtgtcgatacgcttggggttgagggtggtttcaagtttcagggtgttgtagggaaaatccagccactggtccttgtccttgacgcgcaaggtgccaccactggcgtccaccatcaccacgcccttggggccactggccggcaggtccagttgcaggtcggcattgagcttgccctgccaggcgaaatccttcggcaggaacgccgccaggctgtcgatggggaattgcttgaggtggtaacgcagcttcggctcgggcatcaggcgctggtcttcgccgcacaggctggccggcccggacacccagcagtgcgcggcaaaggtcagcctgccatcagccatgcgttcgatcctggccggggcttgcagcttccagtcctggccaccggcttggacgtcgccactggccaagcgcccgcgccagttgcctttgtcgaggttgccgtccaatgccagggccagcttgaccagcgggccgaccaggtcgagctggaccttctggttcttgatatcgccctgggcactggcggtcagggtgccgacctgggtctcgccggattggataccgctgcccttcaggtcaatcttggcgcgctgggcactgtcgagactggcgtcgagggtgaggctttgcaggcggttatcggcaaacgccagttgctggcccttgaggtcgagtttgccttggggcgccttgaggctgccagccacgtcgagtcggccattgacctgcccgcgcaactgcggccacaactgggccaggcgcgtcagtttgatgtcgatctgcccggccaggcgttgttgcaggctgccactgccgttgatgcggttgtcgcccaggcggatattcaggttggccagggtccactgctcacccgcgccttcggccttggctgccagcacggcggtttgcccgcgcaggcggcccttgaggtcgaggtcggcattcagcttgagctgctcgtgcttgaactcgcccttgctgcgcagcggcccggccagggtgccgggcaattcggcgacccagtacgccgggttcagcgcagacaggtcgagtgccgtgtcccaggcgatgccatcggcgaattgcagattcaggtggccctcggccttgccctggccggcggtgagtttcagctcgggcaggaagatttgcttgaggtcgccactgaacggcgtgaccacgttgaacttgcctgcggggccgtcgaggtcggccttgaggttgcccaggtagttgccatccttgtaggagatctcgccattgaatgtacgcagtgcaacttggggctcatcgatgacgggataaaggcgatgccaggggaagtccagccagtcgaccttggcgtcagcgctgaagccttgttgccagtccaggttggcgctgagtttcaggctttgcttgtcgtcgccatacaggtcgagtttttcgatctgcgcccctttggcatccacgcgccccagcaacaacaggcttaccgggctcttttcggcaggcagcgacgccttgcccgagagcacataaccggttttcaggtcgcccttggccaggagcaccagctcattgagttgcagggtgtcaggcaaaccggcatccggcttgaacgcatcggacttgatcagcacttgtcccggcagatcttctgccagcggttgcaactgcgccagcaggctgccgtccaggtagccatggctatcgccgttgacggtgagggtcttgagcaagtcgccttcgactttgaggccaaccgtccactgttcaccaccgggcgcgtaaggcaggctcaagttaccgctggcgttcaacggccagtcgccggtgggttgcagcagaccagccaggtccagcaccaggccatcgcgttgcagatgcaccgaatcaatttgcatgcccgcggcggtccagtgcgccgccagttgcaggcccttgagttcttcgctgccgttgaacagcaggctgccgacgcgaacatcgcccaactggatggccagcggcagtttcagatcgggtagttcgatcgggccgctgctctgctcggtactgggagggaattgcaggctgacttgctcgacatccagttgattgatgcacagggtcatgcgcaacagacacgccggcgaccaatccagcttgggcgcctggagttcgacacggctgctgtcctgctgccacagcagatggtcggcgctccactggccacccaaatgcccctggaaattctccagggtcaaccccggcacgcggcccaatgcccagcggctgcccgcctgggtgcccagcgccgtccacagtgctagcaacaacacggcaaggctggccaccacggccagccccgctattttcacaccacgcatcacagctcaggccccatggaaaagtgcaatcgaatgccgcccgggtcttccagggcatgggccaggtccagacggatcgggccgaccggcgacacccagcgaataccgacgccgacgccggttttcaggctgggcaggtccagattgttgaaggagttaccctggtcgatgaaggtcgcgatccgccatttctcggcgatggaatattgatactcggcgctcagggccaccatgtagcggccaccaatacggtcgccgcgatcgttctccggcgacagcgtctggtactcgtagccgcgcacgctctggtcgccaccggcaaagaaacgtagcgacggcggcaccgagttatagccgttggtggcgctgccgcccacctgcgcacgggccaggaagcgatggttgtcccacagcgtcgtcaggcctttgaccatggccgtgccgtaaagcaggttggtatcggagcccaggccttccttggcgactttggtgtcgaattgcaggcggtagccgttgtgcgggtcgatacggttgtcactgcgcaggtaggagtagctgatccctggcatcaccaggttactcaggccggagtcattgcccaggcgatattcttcacgctggtacttgagcgaaatcacccgggtccagccgctgggcagcttgctgtgccactcggggcccacggtgagcaatttactcagggtgtcggtgttggcgatctcttcgttctgatagccaccggcaaagcgcagtttgtcggtgagcggtgggtccagtggaatgtcgtaccacaggccgacgttctgtcgcggcgccgacagctcggcttcccaaccatagctatggccctgggggttgacccagtggcgggtccagttggctttgccgcgcgggccgacgtcggtggagaaacccaggcccaggcccatggtgcggggtttgcgggtctccaggcgcacggccaccgggatgatgtcattggttgaagccgccggggcggcgtccacgcgcacgccttcaaaaaagccactggcttgcaggttctggttgagttcggcgatcagttcggaatcatagggcgtgccgcttttgaacggcaccatgcgttgcagcagctcttcgtcaaacggcgtgtcgccggcaaagctgaccttgcccaaggcgtaacgcggaccgctgtcatagatgagttcgatatcggcgacaccggccttggggtctaccgctagtttctggcgggtgaagcgcccattgaaaaaaccgtagcgcgaggcctggttctggatcaggcgcttggcgtcttcgtaatggccgtggttgagcacagcgccggccttgaggtcgttgctgacgggcacgcgaaaggtcttgaggtctgcggcggggccgtcgacccgtatggtcacgttgcgcaaatgcaccggttcgccggggtcgatggtgaggatcaggcgcgggttcttgccgcctttcacctcactgtcgatttgtggctgatagaagccaagggcctgggcggctttgcgcgcctgctcctcggcgccacggctgaaccgcagcaaggcctcttcatcacgatcgcccaccccgccgatatagccttcgatgttggctttcaacgcgtcgtttgagggtttgatccgcacgtccagttcgctttgcgccaacgcgccgcagcttgtgaacagcagaatcaagccgctggtaaatcttcctggaaacttcataggcgcggatgctacacgagcaagggagactctttgaactcggatttatctgaataattctggattaagccgttgcagcatgtaacgactgcggattcggatggaaaaacacatgctcgaggaccgggcctaccgccacttcaccgatttcctcgtagccctggcgtttatagaactccagataacgtgaattccccgtgtccagcaccacaccggacgaatgcgggtcttcggcacaccaattgtgcacggcttccagtaactgctcgccgtaatgcttgccctggaattgcgggtggatgcccagcaacggcagcacatgcaccgactcactgggcaggcacgccagcaccgcgtgatggtagtcgaggtaacgccgtgtaccgcgcacgccggtactcagccacatgcgcagttgccaggcccagctctcggtgatgcccaggcgccgctgcggtggcgcgatcagggcgatgccgatcaggcggtcattgacgaacaaaccaatggccggcagtttctgaaagaagtgctgcttgaccaactcgcgcacggtggcgcgtacccgttgttcataaccaggacgctcggcttcgaagatgtaggcgaaggtcggctcgtgccgataggcctggtacaacagggatcgggcctcgcgggaatagccgctgttgagcaggcgaatttcagcaattgcagttgtagtgtccggcataccgtcaatctccctgggcgcggctcaaaaggcagcgttcttatgggtacgaacctacacagcacgagtcgttcccagacattagcagtgcatgtgccctaccgccacgctggcccccgtccgacttgtccgctagcatcgcccttttgccagaccggactgccgaccatgaaaatcgtctccttcaatatcaacgggctgcgcgcccgcccacatcagttggcggcgctgattgaaaagcaccagcccgacgtgatcggcttgcaggaaaccaaagtccacgatgaccaattcccgctggctgaggtacaggcccttggctatcacgtgtactaccacgggcaaaaaggccactacggcgtcgccctgctgtcgcgcaaggaagccctgagcgtgcacaaaggctttgccagtgacgaagaggacgcccagcgtcgctttatctggggcaccttcgccgacgagaacggccacccagttaccatcatgaacggctatttcccccagggcgaaagccgcgaccaccccaccaagttcccggccaagcagcgcttctacgaagacctgcagcaactgctggaaagccagttcagcaacgaccaggcgctggtggtgatgggcgacgtgaacatttccccggaagactgcgacatcggcatcggcgccgacaacgccaagcgttggctcaagaccggcaagtgcagcttcctgccggaagaacgcgaatggatggcccgcctgaaaaactggggcctggtggacagcttccgccacctcaacccggacgtggccgaccgcttcagctggttcgactaccgcagccggggctttgaagacgagcccaagcgtgggctgcgcatcgacgtaatcctcgcctccaatggcctgttggcgcgggtcaaggatgccggggtggattacgagctgcgtggtttggaaaaaccgtccgaccatgcgccgatctggctggaactgagctgatcacaccctgtgggagggggcttgcccccgatggcagtgggtcttcagcccatctatagctgacacgccgctatcgggggcaagccccctcccacatttagccttgcggcgcgtacgtcatatttatgcaacctgtctgacttattctcgcggcaccccctttggcttgagaaggtgccggcatgaggctgcgcgttctgttactgctgactgtttttcccctcttcgccgtttccgcctccctgcccgttcctgatcaaggccctgctttgcgcatccagggctccaataccattggcgcggcgttgggcccggcactggtcaaggggctgatggagcatcagggcttgcaggcggtgcacaacgaaccgggcgaaggcgccaatgaacagcgtgtgatcggcaagacgcgccaaggcaagaccgtgaccatcgaagtcgcggcccatggttcgagcaccgggttcacggcgctgaaaaaagccagcgccgatctggccgcctcgtctcgcccgatcaaggacaatgaactggtcgaccttgaacccctgggcgacctgaaaagccccgaagccgaacaagtgattgccatcgacggcctggcgatcatcctccacccgcagaacccgttgaacacgctgaataccgagcaactggcgcagattttcaatggtgaggtcagtacctgggaggcactgggtggagtgggcggcctcattcatgtgtacgcacgggatgatcaatccggcacctacgacacgttcaaggaactggtgttgcgtttgcgtggcaagccgcttgcatcgggtgccaagcgcttcgagtccagcgagcagctgtccgatgcggtcagccacgacccgcagggcatcggctttatcggcctgccctacgtgcgccaggccaaggcggtggcgattgtggacggcgactcacagcccatgttgccgctcaacagcctgattgctaccgaggattacccgctgtcacgccggttgtttttctacctgccgccgtccgggcgtaacccgtgggccaaggcactggtggactttacccagggcaccaagggccaggcgattgtggccgccaacgggtttattgcgcagcaggtgcaggcgatcgccgtgcaaccgcgcccgtcgatgcccgaggactaccaggccatcgcccgcgaggcccagcgcctgacggtgaattttcgctttgaagaaggcagcgccagcctcgacaacaaggcgcgccaggatctgcagcgggtggtggcctatctgaaacaccacgacaagttaaataagcaggtgacgctggtgggctttggcgatgccaaggatgacccgcagcgcgccgcgttgctgtcgaagctgcgggcgatggcggtgcgccgggagttggtcaagaacgccgtggtgctgcgcgatatccgtgggtttggcgcgcagatgccggtggcggcgaatacggcggatgaggggcggatcaagaatcggcgggtggaggtttgggtttactgaagactgatggagcttcattgcctgatccgactgcatcgggggcaagccccctcccacattttgatctgtgaacacatccaagtgtgggagggggcttgcccccgatgcaggcgacccgctgttactgcccgctgcgcatcagctctttaggcacatacttgccaatctcgaacttgccgatggccgcccggtgcacttcatccgggccgtcagccaggcgcagggtgcgttgcatggcgtacatgtaggccagcgggaagtcgttggacacgccggcaccgccatggatctggatcgcgcggtcgatcaccttcaacgctacgttcggcgccaccaccttgatctgggcgatttcgcttttcgccactttgttgcccacggtgtccatcatgtacgccgccttcagggtcagcaggcgcgccatgtcgatctccatgcgtgagtcggcgatcttgtcgatgttgccgcccaaccgggccagcggtttgccgaacgcggtacggctgaccgagcgtttgcacatcaattccagcgcgcgctcggccatgccaatggagcgcatgcagtggtggatacggcctgggccaaggcggccctgggcgatttcaaaaccgcggccctcgccaagcaggacgttctcatagggtacgcggacgttgtcgaacagcacctcggcgtggccgtggggcgcgtcgtcgtagccgaacaccggcagtgggcgcacgatcttcacgccgggagcgtccaccggcaccaggatcatcgagtgctgctggtggcgtggcgcatccgggttgctcaggcccatgaagatcaggatcttgcagcgcgggtcgcaggcgccggaggtccaccatttcttgccgttgatcacccactcatcgccctggcgttcggcacgggcggccatgttggtagcgtcggaagaagccacgtccggctcggtcatggcgaacgccgagcggatctcgccgcgcagcagcggctccagccagcgtcgcttctgctcttcattggcgtagcgcaccagcacttccatgttgcccgtgtcgggggcggagcagttgaacggctccgggcccagcagggaacggcccatgatttcagccagtggcgcgtattcgaggttggtgaggccggcgcccagttcggattcgggcaggaacaggttccacaggccttcggctttcgccttggctttcagctcctccatgattgcggtgggctgccagcggtcgccttcgctgacctggcgttcgaacaccggctcggccgggtaaacgtaagcatccatgaacgcagtgacacgttcacgcagttcctgaaccttgggcgaataggcgaaatccatgagcagctcccttctctgagaggttgtttaggtcatgcaatcgatgctagaacagcgttgataatttacctagcctattctcggcgtgtattaacattcatcaccgatatatgatcgacgtatggccacctaacaataagagcgctgcgaaatgaatctgagcaaggtcgacctcaacctgtttatcgtctttgatgcgatctacaccgaagccaacctgacccgcgccgggcagattgtcggcatcacccagccggcggtgtccaacgcgctggcccgcctgcgtgagaccttcaacgacccgctgttcgtgcgcaccgcccagggcatggtgccgacgcccatggcgcagaacatcatcggcccggtgcgcaatgcgctgtcgttgctgcgggtgtcggtgcaggaaagccgcatcttcaacccgcagcaggcggccaagacttaccgcatcagcatgaccgacctcaccgaggcggtgatcctgccgctgctgttccagcgcctgcgccgcctggcacccacggtggtgatcgagagtttcctgtccaagcgccgcgaaaccaccaaggaactggccgccgggcgcctggattttgccgtggatgcgccgctcaacaccgacccgcaggtacgccacgtcaagctgatggaagaccgctacgtgtgtgccatgcgcaagggccatcccatggccggcaaagacaagctcacgctggatgactacctgtcgctgacccatatccatatctccagccgccgcaacggcctgggtcatgtggacctggcgctgggcaagatgggcatccagcgcaagatcgccctgcgctcccagcattacctgatggcctcgcaggtgctgcagcagaccgacatggtcatgaccgtgcccgagcgcttcgcccgccgccatgaactgcactggttcaacctgccggtcaacgacgtgccgccggtggaaacccacctgtactggcacgaaagcaccgaccaggacccggccaaccgttggatgcgcgagcagatgatcgagttgtgccagcaggtcaccgcccacgagaagaaactcgataaacaacaggcgtgaggttgaagcgccggccctgtgggagggggcttgcccccgatgggtcgcgcagcgacccttgacgtttacgtcaacctgccagtagcttaacgccaagacctccttgagcgcccccatgagcaccacctacagcatctccgacctcgcccgcgagctcgacatcaccacccgcgccattcgcttctacgaagaacaaggcctgctggccccggaacgccggggccaggagcgcatctactcggcccgcgacaaggtcagcctcaagctgatcctgcggggcaagcgcatcggtttttccctggccgaatgccgcgagctgatcgaactctacgaccccaccagcggcaaccacgtgcagctcaacagcatgctggcaaaaatcgccgagcgccgtgagcagctggaacagcaactgctggacatcgaacagatgaagctggaactcgacaccgccgaagagcgctgcactcaggccctggcccacaccctgcgccaggccgaccactgatcagaaggtaaccgccatgtccctcccctcacacgtacgcctggtggaagtcggcccgcgcgacggtttgcagaacgaagcccaacccatcagcgtggcggacaaggtccgcttggtggatgcattgagcgcagccggcttgcgctatatcgaggtcggcagtttcgtttcacccaagtgggtgccgcagatggccggttccgccgaggtgtttgcgcagatccagcgcaagcccggcgtgacctatggtgccctggcgccgaacctgcgcgggttcgaggacgcactggcggcgggcgtaaaggaagtggcggtgtttgccgccgcgtccgaggcgttttcccagcgcaatatcaattgctccatcagtgaaagcctggagcgctttgcgccgatcatggcggcggccaggcaatacggggtcagcgtgcgcggctatgtgtcgtgcgtgctggggtgcccatacgaaggcgagatcgcgccggaacaggtcgcggccgttgcgcgggaactctatgccatgggctgctatgaagtgtcccttggcgacaccatcggcaccggtacggcaggcgccacgcggcggctgttcgaggtggtcgcagcccaggtgccacgggacaagctcgccgggcacttccatgacacctatggccaggccatcgcgaatatctacgccagcctgctggagggcatcacggtgttcgacagctctatcgcgggcctcggcggctgcccgtatgccaagggcgccagcggtaacgtcgccaccgaagacgtgctgtacctgctcaacggcctgggtatcgagaccggtatcgaccttgaggcattgattggcgcggggcagcagatcagcagcgtactgggccggccaacaggatcgcgtgtggccaaggcgcgtaacgccggttgagtagcttagccgtgacaatgtgttaccgcacgcctacacgtcgagtaacacgggaacatattttgtcgtatttgccgtaggccaaaccccacacaaaaatcaactcattgattttaaaggaatttaaaaagttggcacggcttctgctatctctatggcataacaagaataaaaagcgccaaacctaataaaaataagacgaaacgactctgatataacaaaaacaatacggcagagacgcagctaacagatttttttggagaagatgtgcttcgcagggtacggcatgacgaaacccgcaaccggtcagagaaaaataaaactacctcaggtagctgcccactggttggatcgattgcgaagaagcagatcagcgctcaaaaaaatacgtttgctcttgaccccggatgggggtcgccaaaaacagcggtaaagggtaacggttgccaaaaacaacaatagaccgcccctcaataataaaaaaagagcacgcaacgacaaattaaaggggaccctcgggtcccctttgtgctttcagggatttattcctgccctgcccccaactcttgcatggaaatctcgcgcatgcggaatttctggatcttgcccgtcaccgtcattggaaactcctctacgaacttgaagtgcttgggcgtcttgaagtgcgcgatgcggcccttgcaccaggtttgcagctccagctcattggcgacatggccggggtggaacttgatccaggcgacgatggcttcaccgtagcgcgcgtccggaatgccgatgacctgcacatcggctacagccgggtgggtaaagaaaaactcttccaactcgcgcgggtatacgttctcgccgccacggatgatcatgtccttgttgcgcccggcgatgcatacgtaaccctgggcatccatgctcgccaggtcgccggtgtgcatccagccggcgtcgtcgatggcctcgcgggtggcgtctgggttgttccagtagccgagcatcacgctgtagccacgggtgcacaattcgccgatttcaccgcgcgcgagggtgttgccgtcggcgtcgatgatcttgttttccagctgtggctgggtgcgcccgaccgtggtcacacggcgttccaggtcgtcgtccgctccggtttgcagcgacaccgggctggtctcggtcatgccgtaggcaatctgtacctcgcgcatgtgcagctcgctgatgacccggcgcatcacttcgatggggcacgtggcgccagccatgatgccggtgcgcaaggtggacaggtcaaagtcgcccagctgtgggtgatcgagcagggcgatgaacatggtgggtacgccataaaggccggtggcgcgttcttcggcgacggtggtgagggtcagcagcgggtcgaagccgtcgttcggatagatcatggtggtgccatgggtgatgcagcccaggttgcccatgaccatgccgaagcagtgatacagcggcaccgggatcaccaggcggtcttgcgcggtcaggcccaggctttcgccgaccatgtagccattgttgaggatgttgtggtgactgagggtagcgcctttgggaaagccagtggtgccggaggtgtactggatattcaccggctggtcgaaatgcaggctggcttgccggctgtgcaactgttcgggcgggacgccagccccgagcacggccaattgcgaccagggcatgaaccccgcgggcgggttgggatccaggctgatgaggccacgcacgtccggtttcagctcgtgcagcatggcgtggtaatcggagctcttgaatgagccagcacacaccagcaactggcaaccggactgcttgagcacgtagtccaactcactgctgcgataggctgggttgatattgaccaggatcaccccgagcttggcgctggcaatctggctgatgcaccactcggcgcaattgggcgcccagatgcccaggcggtcgcccgtctgcatgcccagggccatgaacgcccgcgcgtgcaaatccaccgtctcggccaactgccgccaggtgtagcggcgttgttgatggcgcaccaccagggcctcgccatcgggatactgcgcaactgtgtgatcgaaagcctggccaatcgtcatggccagcaaggtcttgtcctgtgagccacggctgtagctctgattcggttgatccataacgacccctgttgtcttttttgtaggttgacgtaaacgtaaactacgattgacagcgccgtaacgcaagcttacgttaacgtaaaggtgagcgccctcccctggcgccccatctacacaacaacaatgctcacattaaggtgcctgtccatgagttacccgtccctgaacttcgccctcggtgaaaccatcgacatgctgcgcgaccaggtgcagtcctttgtgggcaaggaaatcgcgccccgtgcggcgcagatcgacatcgacaacctgttccccgccgacctgtggcgcaagttcggcgacatgggcctgctaggcatcaccgtgcccgaagaatatggcggcgccggcctgggctacctggcccacgtggtggccatggaagagatcagccgcggctcggcctcggtggcgctgtcctacggcgcgcactccaacctgtgtgtaaaccagatcaaccgcaacggcagtcacacacagaaactcaagtacctgcccaagctcatcagcggcgaacacatcggcgccctggccatgagcgaaccgaacgccggttccgatgtggtctcgatgaagctacgcgccgataaacacggcgaccgttacgtactcaacggcagcaagacctggatcaccaacggccccgacgccagcacctatgtgatctacgccaagaccgacctggaaaagggcccgcacggcatcaccgcgtttatcgtggagcgcgactggaaaggcttcagccgcagcaacaagtttgacaagctgggcatgcgcggctccaacacctgcgagctgtttttcgatgacgttgaagtgccggaagaaaacatcctcggcgtgctcaacggcggcgtcaaagtgctgatgagcggcctcgactacgaacgcgtggtgctctccggcggccctaccgggatcatgcaggcgtgcatggacctgatcgtgccctacatccacgaccgcaagcagttcggccagagcatcggcgaattccagctgatccagggcaaggttgccgacatgtacacccagctcaatgccagccgcgcctacctctacgcggtggcccaggcttgcgagcgtggcgagactacgcgcaaggatgccgccggggtgatcctctacagtgccgaacgcgccacgcaaatggccctcgatgccatccagattctcggtggcaatggctacatcaacgaattccccgccgggcgcctgctgcgcgacgccaagctgtatgagatcggcgccggcaccagtgagatccggcggatgctgatcggtcgcgaactcttcaacgaaacccgctgaaggagcgctccatggccaccttgcacacccagctcaacccgcgttcggcggagtttgccgccaacagcgcggcgatgcgccagcaggtcgacgccctgcacaccctgctcgcccacgtgcagcaaggcggcggcgccaaggcacaggagcggcacacctcacgcggcaagttactgccgcgcgaacgtatcaatcgtttgctcgacccgggctcgccgttccttgaactcagccaactggccgctcatcaggtgtacggcgaagacgtgccggccgccggggtgatcgccgggatcggccgcgtggaaggcgtcgaatgcatgatcgtcgccaacgacgccacggtgaaaggcggctcctactacccgctcaccgtcaaaaaacacctgcgcgcccagaccatcgccgagcagaaccgcctgccgtgcatctacctggtggactccggcggcgccaacctgccgcgccaggatgaagtgtttcccgaccgtgagcacttcgggcggatcttcttcaaccaggccaacatgagcgcccaaggcatcccgcagatcgcggtggtgatgggctcgtgcaccgccggtggcgcctatgtgccagccatggccgacgaagcaatcatggtgcgcaaccaggccactatcttccttgccggcccaccgctggtgaaggccgccaccggtgaagtagtgactgccgaagacctcggcggtgccgatgtgcactgcaagatctccggcgtggccgaccactatgccgacagcgatgagcatgcactggcgctggcccggcgcagcgtggctaacctcaactggcgcaaacaaggccagttgctgcaacgctcgccagtcgcgccgctatacagcggtgaagagttgtacggcgtgatcccggccgacgccaagcagccgtttgatgtacgcgaagtcattgcacggctggtggacggttcggtgttcgatgaattcaaggcgctgtttggcaccaccctggtgtgcggctttgcccacctgcacggctacccgattgcgatcctggccaacaacggaattctgtttgccgaagccgcgcaaaaaggcgcgcattttatcgagctggcctgccagcgcggtattccgctgctgttcctgcagaacatcaccggcttcatggtcggccagaagtacgaagccggcggcatcgccaagcacggcgccaagctggtcaccgccgtggcctgtgccaaggtgccgaaattcacggtgatcatcggcggcagctttggtgccggcaactacggcatgtgtggccgcgcctatgacccgcgctttttgtggatgtggccgaacgcgcgtattggcgtgatgggcgccgaacaggcggcgggtgtgctggtgcaggtcaagcgcgagcaggctgaacgcgccggcacagcgttcagcgccgaagaagaggcggcgatcaagcagccgatcctcgaccagtacgaaacccagggccacccctactactcgagcgcgcgcctgtgggacgacggtgtgatcgacccgttgcagacccgtgacgtgctggccctggccttgtccgctgcgctgaatgcccccatcgagccgagccgcttcggcgtgttccgcatgtaaatggagctgtaccccatgagcgatttcaacaccctcgaactgatcaccgacccccgtggctttgccacgctgtggctcagtcgtgaagccaagaacaacgcgttcaacgccgagatgatccgcgaactgatcatcgccctcgaccgggtacaaggcgatccgtccctgcgcttcctggtcctgcgcgggcgcggcaagcacttcagcgccggcgccgacctggcttggatgcagcagtcggccgagctggactaccacaccaacctggacgatgcccgcgaactcgcggagctgatgtacaacctggccaaactgaaaatcccgaccctggcggtggtgcaaggcgcggcctacggcggtgcactgggcttgatcagttgctgcgacatggcgattggcgccgatgatgcgcagttctgcctgtcggaagtgcgcatcggcctggcgccagcggtgatcagcccgttcgtggtacaggccatcggcgaacgtgcggcgcggcgctatgccctgaccgccgaacgctttggcggccagcgagcgcgcgacattggcttgctggcggaaagctatccgatcggcgagctggaccatcaggtcgaacagtggatcgccaacctgctgcacaacagcccggcagccatgcgcgccagcaaagacctgttgcgcgaagtgggcaacggtgccctcaccccggcgctgcgtcgctactgcgaaaacgccattgcgcgcatccgggtcagcgccgagggccaggaaggcttgcgcgcgttcctgcaaaaacgtccaccgagctggcagccccaggagccgcgttcatgagtacattgacgaccctgctggtggccaaccgtggcgagatcgcctgccgcgtgatgcgcaccgccaaggccatgggcctgaccaccgtggcggtgcacagcgccatcgaccgcgatgcacgccacagccgtgaggcagatattcgcgtcgacctcggtggcagcaaagccaccgacagttacctgcaaatcgacaagctgatcgctgccgcccaggccagcggcgcccaggcgatccatccggggtatggttttttgtcggagaacgccgggtttgcccgtgcgattgaagccgccgggttgatcttcctcgggccgcccgcctccgccatcgatgccatgggcagcaaatcggccgccaagacgctgatggaaaccgcaggcgtgcccctggtgccgggctatcacggcgacgcccaggacctggacaccttccgcgccgcctgcgaacgcatcggctaccccgtgctgctcaaggccaccgccggtggcggcggcaagggcatgaaggtggtcgaggacgtcagccagttggccgagtcgctcgcttcggcccagcgagaagcgctgtcgtctttcggcaatgggcagatgctggtggagaaatacttgctcaaaccacgtcatgtggagatccaggtgtttgccgatcagcatggacactgcctgtacctcaacgaacgagattgttcgatccagcgtcgccaccagaaggtcgtcgaggaagcaccggcgccggggttgagtgttgaacaacgcaaggccatgggcgaggcggccgtgcgtgcggcccaggccatcggttatgtcggcgcgggcaccgtggagttcttgctggacgcacgcggtgagttcttcttcatggagatgaacacgcgactgcaggtggagcaccccgtcaccgaagcgattaccggcctagatctggtggcctggcagattcgtgtcgtccagggcgaggcgctgccgatcacccaggaacaggtgccgctggtcggccatgcgatcgaagtgcggctgtacgctgaggacccggccaatgacttcctgcccgccaccgggcacctggcgctgtaccgtgaatccgcacctgggccagggcgccgtgtggacagcggtgtcgagcaaggcgacgacgtctcgccgttctatgaccccatgctcggaaagctgattgcctggggcgaggaccgtgaacaggcgcggctgcggctgctgggcatgctggatgagtttgccattggcgggctcaagaccaacctgggctttctgcgacgcattatcgggcatccggcgtttgcggcagccgagttggataccgggtttattccgcgttatcaggatgagttgctgccggtcccaggagagctaagtgataagttttggcaggcggctggcgcggcctttattcagagcctgccgccgggtgagggaccgtgggcggataggcacggttttcgcgccgggctgcctgccgaggtgtcgctgcatttgagctgcgatggccaggaccgactggtgacgctggccccccaggcgccacagtggcgtggcgaacagttgctgatcgaacaacagggcgtgcgtcgcagccatctggcggtacgccatgaccacacggtgtatctgcgttgggacggcgagatgcatggggtaacactgttcgatccgattgccgcagtcgaggccaaccagtcccatcagggtgggctgacagcgccgatgaacggcagcatcgtacgggtgctggtggaggtgggccaaccggtggaagccggcgcgcaactggtggtgctggaagccatgaaaatggaacacagcatccgtgcgccccaggccggggtggtcaaggcactgttctgccaggaaggcgaaatggttgccgaaggttgcgcattggtggagctcgaaacggcgggttaaaactttgccgtggcctgtacgacgacgcccagcagccggcaatcgtcggtcagcaactgtttcgggtaggtgggattgagcggcaccaggtaacgctggccgctctcttccagcaactggcgaaaggtcgcctgggggctcccaacccactgggccaccaccaatttaccgggctcggcggcaatggccgggtccaccaggatcatcatgcccgcactgatactcaggccactgggtgcggtcatggcgtcgccggtgaccggcagccagaaggcttcgccccgggcgtggtaatccgtcagctcgaagcgggcggcgccgtaaggtgttcgcggctcacgcaattcgcacagccctttccagtcgctgaccggatagcggaaatacgggttgtagtttttctccgcaggcggctcatcgacccgctcgcgaatatccagcgcgacttccaggtagcccagccccagcgccgccagcacccgattcatgtccaccaggctcggcgcacggcgcttgttgagccaatggccgacaccgccctgggacatgcccaggcgctcagccagttcaccctgcgtgaccttgcggtcttccatgttggccctgaccaacgcgatccagttatccatgggcgcagacaatacgtcacgcagtttccagggcaataaacagtttgtagtaatccataaaacgacataaatacgatacgtactatcatcggcataaggttttcgacacccaccccagagtaccgccccttatgacgacaagcccgtatctgctgcctgaaatccccgaagacaccgagctgcacgacctgcgcagcagcggtgctgccaagcgcgcattggacttttacttgaaagaagatatgtcggcatcagccccggacgaggccctgtttgccatcaagccaggcatcagcccggaggaagccctggtgcacgcctcggacctgttgcgcagcgccgcggccacggcctatgagtcagcgagcagccatcagggcagtcatcgcgacttggcgttttcggtggtgtatttgatcgatatggcgaaggcgatggtggagcgatcgttgcaggtgccggaggctcaagcgaacggatgacaggcgcgaagaaaaaatatttctatctcacggataaaaacatttgacttgcaaatgataatgattattattgaacccagctgatcgcgagatcagtcgatagaccaagggaccttaggtcggactcttggaatatctcctcatcaggctaatcacggtttttgacccggctctttggccgggtcttttttttgccagtttccctggcatggcttcaggctaatgaagactgtgtgttgcttgatggcgcgcatggtagcaaaagactatcgccaaaagaaagccagtcgaccgctccagcccacatctttgcgaaatagcgcttgagaatcaatctcatagaccctaagctgctgcggcgtcaaggaagacgcccccctcccccttcgcaacaattttgcgtccagtctttaccagactcctgtgtaagatagccgccacaacactcatattcaggcaaccagactatgaccgtggccttgacctccatcaggatcagcaccgacttcgacagtggcaatatccaggtactggatgcccacgacgcctatcagttactgctggcaatcaaacccgacacacgcagccaacattaccaatggttccacttcaaggccgaaggcatgcacgtgggccatacccacacctttcgcctgagcaacgcgggtaaatcgtcctacccacacgcgtggagtggctacaacgccgtggcctcctatgaccacatcaattggttccgggtgccttcgcgcttcgatggggaaatcctgcatatcagtttggaaacccgcgagaagcacgcctggttcgcctatttcgaaccctacagccgcgaacgccacgactggctgatcgaacaggccttgagccgcgccgacacccaattgctggccaccggtaaaagtgccgaaggccgtgacatccaactgctgcgtcgcggcaaaggcggcgaaggtcgtcgcaagatctggatcatcgcccaacagcatcccggcgagcacatggccgaatggttcatggaaggcatcatcgaacgcctgcaacaggacggtgacgccgagctgaaaaaactgctgaaagtcgccgacctgtacctggtgcccaatatgaacccggacggcgccttccacggtcacctgcgcaccaatgccatgggccaggacctcaaccgcgcctggcagagcgccagccaggagatcagcccggaagtgttgttcgtccagcaacaaatggaaaagtacggcgtcgacctgtttctcgatatccacggcgacgaggaaatcccctacgttttcaccgccggctgcgaaggcaacccaggctacaccccgcgcatcgaggcattggaaaaacacttccgcagccacttgagcgccctgacccgcgacttccagaccacccacggctacacccgcgacctgccgggcgaagccaacatgaccctggcgtgcaacgcggtcggccagaaatacgactgcctgtcgctgaccctggaaatgcccttcaaggacaacgacgacgcgcccaacccgaagaccggctggtcaggcgagcgctccaagcagttgggcaaggacgtgttgagcacggtagccgatatcgtcaccgtgctgcgctgacgccctctcccaccggcatcactcttgggtgccggtcatgctctgcaacacaccgtcgcggcggatcagcccatggaacaatgccgccgccaggtgcaacagcaccgtcaggaacagcaggtaggcgagataaccatgggccttgcgcagcaccgcgaacaacggcgcatccgcgcccaccagcgccggcagttgtaccgaactgctgagcatcaccgggtcgcccgccgccgaaatcatcgcccagcccagcagcggcaataccagcatcaaggcatacagcaacacatgggatgccttggccgccaacacttgccacagcggcaagtcggtgggcaatgggggctgacgggtggcgaaacgcaccatcaggcgcacgatcaccagcgccagaattgcaatgcccagcggcttgtgcaggtggatcaaccactcatgccgctccgagacagacgccgccaggcccgcaccgataaacagcatggcgatgatcatcagcgccatcagccagtgcagcaaacgcgccagcggggcaaaaaaccgtggttgggcattcatggcttcgactcctgaggggcgctgtgcaacgggccgacttcaccggcgcggcgcaggtaggaactggcatacgccgccgagcgtgccgccagcaacgggtcattggacgcttggatgccactgggcagaatcagcgggtcgaagttgatgtcgcggcaatcaccgtccgcttgcggctggctgctttgcagcaccagggtgccggcattgatgactttatgctcgccagtccaggccttgctcgcctcgtccagtgggtcacccgggttggccagggtcatattcaactgccagcgcaacggcccggtagccaggcgctggaccaggtctttttccaggtaatcactccccgccggggcgacgtcgcccgccgcgtcctgactctgcggtaccacaccccagcgcacggcctggcgcttgccatcggcccctaccaggtaaaacgcgttgataccgttgtaggtttcagtcgcataactggccgaaggcttggcagtcttgacccacgccaggaacggcgcggtctcggggtgggcggcgaaaaacgccggcatgctcgccgggttcggcttgccggtggcgggctccggtgcaccggccttgagcatctggtagaacgcctcgggcgtgcccaccgggaacaccggcatgctgttcatgccggtgcgccattgctggccgttggcctgtgtgaactgcagggcaaaactgcggatcggcacactgctgtcgggcgcgtaagggttaccgctgggcaaggcaaaccggccgatcactggggtcttggcctcgctgaacacttgggcactggaataggtgcgggcttcgggcgtgctctcgaaatacccggcgacgcagatgcctttggcatggttacgccgaaagcccgggtgcacgccattgttggtttccagcgcgttgaccagggttttaggacgcaggcgctgtgggtcgagggtgccgttgacgtaggcaaaggcccccgccacaaccgcaaccacggcaccgatacccgccaggcgcgcgatcaggctcgcgatgctcaacggaggacggggcggtgatgagtgatctaccatgaaggaactccaggccaaaggccttaggggtgaacataaggtcggagcattaagacgaacgccgatcggctctattccctggccctggatttattttcaagcacggggaataaccctcaacggcgcacgtctctctcatcccagcgtagtgaccagccagattcccatgcatgaactcgacgaacagttacgcgaactcatccccaggctgcggcgctttgccgtgtccctgacccgtaacgccagcagcgccgacgacctggtgcagtcgaccctggagcgggcgatcatcagttgggccgataaacgtgtcgaaggcgacttgcgcgcctggttgttctcgatcctctaccggcaattcctcgatgctcaccgccgcacccggcgttatgcgcgcatgctggaattctttaccgggcgtgacgatgtgcagccgtcggtcgaacgcacggtgatcgcccagtcgaccctgcaagccttcgatcagctcaacaccgagcagcgcgccctgctgctgtgggtttcggtcgaaggcttgagctacaaggaagtcgccgagatcctcgatgtgcccctcggcacagtgatgtcacgcctgtcccgggcgcgccaagccctgcgtcaactcagtgatggcgaaattgccagcccttccctgcggatactcaaatgatcagcctgccccccagcgaacgcgatttgcatgcctacgtcgatcaccaactgctggagagtgatcgccgtgtccttgaaacctatctggcggcccacccggatgtcgcagcccaggtccatgcctggcagcacgacgcgcagttgctgcgtgccgcgttgggcggtgccctgcagcaaccggccaacccggacctggacccggcgctgatccgccagcgcatcaagcgtcaatcacgccgccacttcgccacggcagccgtgctgctgatcgctgtcagcctcggcggtgtcggcggctggcacgcccgtgaagtcagccagccggcccaactgcccatggccgatgcgatgcaggcgttccgcttgtttgcccaggacggcatcatgccggccgactacaagggccagggcggcggtacgatgcaggcctggctcgaccgctatttcaaccaggcccaccgcctgcctgacctgagcgcgtcgggcttcacgccggtcagcgggcgcctgctcaccaccgagcaaggcgccgccgccatggtgctgtacgaagacccgcaagggcggcgcatcagcttctacatccgcccgccaggcccggaaaacggcttcctgccgcgtggcagccgcagtgccgatggcttgcaggcccagtactggtccggtgccggctacaactatgcggtggtcagcccggcggatcagcccaccccggcgatgttgaagttctagaaacccacgtcgagtaccacgttgtcgaggtaggtgccggcgggcggtgtggtttgatcggtgtagatcctggcgttgtagttgaacacctggctgccgctacccaggccattgccggggttgacctcggcgctggaactgtcgcgccgcgccgtgcccacgctgccccagcgcgtggtgccggcgcttttgaagatgtcgtaggccaggtagttgctgcctgagatcatgcgccgccgcccgcccacactgacagcgttctggccgtcgctcaggcccacgctgtaggcactgcccttggtgcaggaaatactgatggtctggccagtgacagcggtgaacccgctgataacgggcgcactgccaaaactgatattgggcgcggtgatctggcagtcattggtgacggtcatgctcacggtcaggagcttgacttggggagtcaggttcttgtcacgcaatacgcacaagttacccacccccaggccaatgcaataatcccaggtccatgcaacgctgaggacttcggtatacaccccggccgccacattcgtcccggtaatactgcccacgtaaagcggcaggttcttgctgcccggccccgtcaaaagccccgcgcttgtcgcaatgccattggggccgaaatcgaactggagcccgcgtgtaatagggaacgtggtggtgttattgccatacagcgtataaccgatcacatcccccgtggggccgaccatgccgctggtggtcgaggtgatcgtggcatagaagtggtcactggtgccgagggcaatcagtgaagcggtgcagctcaacccgccgttgagggtcgaactgttttgcgtcgtggtgcgtacgttgatcgaactcaccgagccaaaactcaccggggccgtcgccaccgtcgaacacagcgccattgcctgccccgagcacaccatcccgaggagcgacagccagcccacgcgtctcactggcacaccaacggcccgatcagcggcacgccttgttgctgctcgtcgacctcgaatcgcgcctggcacgtacgcccttcacccagcgtgacctgcaaggtgttatgcgccgagaggttctccaggtacaccaggccgtcccagccaaccaccgcctgctggttgctttgctcgtgcaccaccaggctgcccaagggcaattcctgatgctgggtgtccaccagggtaacgctcgccgcgagtacccggcgcaatggaaactccagcaggtagccactgccacggcgcaccgacacacgttgttccacattcgggctctgcacattgagcggcaggttcagcggatcgatttcgtacttggcgcggtagtacgcgctgctccacggcaccaggagatgcccattacggtcggtttcgcccaccagctggttctcgtagcgcaccgggatacccgcgaaaccctgggtactcaccaccacaaaggcatcattgatacggttggcggcaaaggtgtcgccacccatccacaccagcgaaccgctggcatccgcccagcgtgtctcggcatcgctgctgccgtacacgccggcctggagctgcaccgactgcaagcgccaggtcaggtcggcctgccgatacgccgcgccatcaccctgggcataaccgaggttgtagcccaccccgccctcgctgggcaccgcgctgctgtaattgaggcgctggcgactggcgccgtccttgctgcgctcggtgctcaaggccaggctgccgttgaggtcgaacggaatcaccagttgcgcctgcatcgcccagttgctgtcgccgatctcgcggttggccgacaggtagaaactggtgttgcgccacagcggtttgctccagctcaggttgagcagccgcgtgcgcgaatcgtccgccgcctgcacatcgaaataccccatgcccaggctgccaaaacgctcaaggttgaggctcagcgtcacctgctcgctgcgtttgctgaggctcgcgtaagcggtgtcgaccagggtcaggtcggcgtactcgtcgtgcctttccacccgctgataggacaggctgtagcgcgtgctgttgtactgataccccaggctcagttgctggccgctgcgcccttcaaatcggctttggctgacggcggcattgagcacgccgaggttgcccagccgcaggttgccacccaggccgcccagggtcaggtcagtggaggcttcggcatggctctccagggtcaaattgtcggaataaccatagcgaaaggtaccgctcgccacgccggggccgtaggcgaagtccttcagggtgtactcccggcgcaaggtgccggcggccaccgaaaaatccgtcaggcctttttccaacagggtgctggtcacatagaacggcaccgtggtcgacacctggcgacccagggcgtcagtcgtcaccaccaccgcttcgcccgctccgttgataaacggcacgttggtcagggtgtacggccccggttgcaacagcgcgctgtcggatttgtagccattgataaacaggtccaccgacgacggcaccgcggcctcaccggcaaattgcggcagggggtaagtcaccaggtccggacgcaccgcgaagtcccgcgagaactgcacaccgccaaggcgcaccgaactgctccagggcaaggcgccgctgatcacatcaccggcttcgtaggtcagcagccgctcatcatcggagaagcgccaggtagtgtcatagcgccggtagccgttgttgaacgtaccgctgctgacgccatcggccaaggtctggcggtactggccggtgttggacaaggtgccccagttgtcgaacaaccgcacttcgttccaagcggcgaggtagctgccgccttcgtctgtgtcgttgaaatacaggtcatagttgagcaaggcgccaaagctgctcattgcctggctgcgcgggtaggtgttgcggttgccgataaattgttcctgcagccacgacggcggcacatccagcagcaggcgctggccgttgctgtcgtaatcgctgtgcaggccggggatcttgtccagcgccacgctgccgctcaattcaccgggcagcttcatgcccacgtcctgcagcgcgctggccggcacatagagttgcccggcccgttgatcgaccgcgataacgcggccggtgtccatctgattgaccaccagctccagatacaactgtgcatcggcgacagcctccatactgctcgggggcggtggcaggtcgccagccacgctcggaagcgcaaccattgcgccgcccagcccgcccaccaccgacagccatagactgcgagccagaccacgactcaccatggcgttgtgtccttcaatggacatctccatccgtttaaatcccggggcgctcctgccccgttaccggcttgttaccgctgcggcgcgaggctctccaactgcggtgcgccgttgatcctgacctgcagcggctggtcggccgacagcgctggcggcaccggccaacgcatgctggcgcccggcagcacgtagcccaacaggccatccaccaagggccggctctgcccaccctgcttgaatgacgcatcggtaaggcgcgcatgcacagcgccctggttgcgcacttcgatatagtcacgccctgctaccgtgaccttgtgccagctcagatccggcttgcccgcgcccttggggtcacgcgggcgcgtgctgtcctccttgttccacaggcccgcaccgtaggcgaacagcggcaccgaataacgcatctgaaagcggatcgccgctgcggtgttcttgccttccggcggcgtgggcacctgcagggctgaagggatttcatcgatgatgatgcggtaggccaactcttgccccggtggtacttcacgggtgcgggtcaagcgcaccaattgtttctgccctggctcgatccgcgcgacgggcgggctgccgatcacatcacgctggttctggtattgctcttcgaaaccactctggctccaggcaaacacgcgaatctgcaggctcgcggtttcggtcccacgattttccagccacagcgcgctcgcctgttgatcggcctccagcaccgggtcgatgggccagatcagcaccgagctggccgcctgcacaagccccgccgtgcacaccgcactcaaggcaatacccgcggcccacaaccgccgggatggtgaacgcataaccccactccttataccgatagccttaccacgtcagctgcacctgcagcgtgtcgctgtatgtccccccaggctgattgcccggcaattgcacccgcccgtagatcggcaggctgatgttgttcgcatcgctgtaggccacgttgacgctctggccgatccccaggctctgactgaacgccgcatccctgaacaactggtaagccacccgcgcgctaccgctattgagctgcagattgcgcccggtgctgctgtgctgcccgccgtcgacgctcatgctcagcgtcacccccggcgtgcactgcaaggtcacgccccccgtcagcgccgccgtgaccgtgctggtggccagggccgaataactgccataggtcagcgcaccataattggaactgccgcccacgatcaggcagcccgggatgatggtcgcgctcacctggaaactctggctggtcaccgccgacaacggcaacggcaccgcgagcccacaggccagcaacgctttgagccacattgctagaacgtcagttccacggccacggtgtcggtgtaggtgcctgccggcagccccgctttgcccaccgcccgaccatagaggttgacggtctgtgccaccccggtgctggtggcgagggtgatcacaccgtcaatcgccagcagcgcggaatggccgctgtcggtgtagaaatcgtagggcacgaagttgcccgcaccgtcggccaatgcacggctgccaccgggggacgcgccgtcatgtgcaccggcgcgcaccttgaccgctggcgtagtgccactggaacacaggatcgacaacgcgccaccggtgccagtaccgcccagcaactgggcatcggcgttggtgaacaggctgttggtggtgccgaaattcaagctaccgaagttcaacccggtagccgcgcccgaaccgttgacctggcaactggcgatcaatatcaggctggaggtgatctgcccggtcaccgtagttgcggcattgaggctggaggccattgccaggcccagcgcacacacacccaatcgcgaaacaagtacatgcatggttttcatcctcttgagttaccagtccagtgtcaccgtcaacgtgtcggtgtagatccctgccggtaaggcactggtatttgccaccacggagccaaacaccgggatcggtatctgggtgcccttggccacgacaaaattgcgttgttgcccgatgctataggtgctgtgcccctgcgggtcggcggacagtcgataaggaatcatctggcgcccattgctcaggcgccgagtggtgccatcaccgttggtgccgccgtcgatggtcacggtgaagctcgagaccgaggggttgcacgacaccgccaagggcgccttgtcgcccgcggtgacgccagcacccaatggattgttccaggtcggaccctgactgccgaagtcgagcatcgccgtgccgcccgtggggttgaccggcgcgctctccacgcttttgctcacttcgcaactggcggtgatcaccagccgcgcctggataaacccgctggcgacagccgcctgcacgtcatctgccagcaccagcaggccacccatggccaccagggccaggcaacggcttaccatgtcaccgtcaccttgagcaggtcggtgtagcggccgacggcggggatctccttgagcggctcgatgcgaccatagagcggcaggtcgacgaaacctgcgtccggcacccggccgctgagcggcacatccacgggcaacggcacgcgccgcgccgcgtcggcatagatgcgatagggaatgggttgggtcgatgtagtagcactgaggtagcgcacttcaccggtgccaccatgcaggccgccatcgacgcggacctggtacggcgtgtcggggttgcactccaggcgcggttggcgctggctgatcagcgccgcactcaggggcccggccgggtcatccagacgcgggccgctgccgaaatccagtacgcccaattgctcgataccagcgctgcgggtggtgcccaccaactggcaaccgcgctgcacgtcgatacgcacctccacctggagctgtgcaccgtaaaccgtgttgcagagcatcgcgcccatgattgccaatactgctcgtcccttcactgccccaaatccttgtacaggggtgactgctgtgtaggaggttagtcactcagcgagaaactgccagtctggacaggattaccttcacgagatgctttttcgagatagctggcagcgtccttctctattggtcaaaacgcgacgagcgccctaaagtgagcgaccaccgaaatacagagtgacttgcattggccgcgctttccctgatccgtcgcctgctcggccaaaagcccgggccccttgacgcttcgcccattcccgcgttttttcagcaaaaggccgcgcaacagggttacaccctgagcaccggtcaaacccgcgccattgctgccctggcccgggaaacccaacaactgctcgctggccagcccgcccgcagcctgtacctccacggccccgtgggtcgcggcaaaagctggctgctggacgggttcttccaggcgttaccgatcgccgagaagcagcgcgtgcacttccatgattttttcgcccaactgcatcgcggcatgttcacgcaccatgcgcaggacgatgccctggccgcgacgctcgatgagcagttggcaggctgccgggtgctgtgtttcgacgaattccacgtccatgatatcggcgatgccatgctgatcacgcggctgttcaaggccctgttcgagcgcggtgtactggtgttggtgacgtccaactatgcgccgcaagggttgctgcccagccccctgtaccacgagcgcttcaagccggtgatcgacctgatcgccgcgcgcatggaggtgctggaagtcagttcgccccaggactttcgcagcctgccccaggcccaaagcacacaacgttttacctgcggtcaatacgtgtggccgggcaccccggggcagcgggcggcactcgacctgcccgccgcagacgcccctccccgccccctgggcgtcggccatcggaccttgatgtgccgccaccatcaagggcgcagcattgccttcaccttcaacgacctgtgcgaacaactgacggcggtgatggactacctgctgctgtgccaggactacgaccactggatcatcgacggcctgcctcaactggcgaactgcccgattgccgtgcagcagcgctttatcaacctggtggatgtgctttacgaccgcgacaagcacctggtactgatcggcgaattaccgctcgaggttgccttgagcggccaggccatcgacctggcccgcaccgccagccgtcttggacaattgcagcaggcctccccgcaacacacccccgacccggtatcatgagcgcctttcacgccttcttgccgagtgaccgcgccgttcatgaataccctcgcccaactcaaggccggccaattggccggcatcacgcgcctggacctgtcctgcgggctgaccgaattcccccgggaaatcttcgagctggccgactccctggaaatcctcaacctcagcggcaatgccctgcgcagcctgcccgaggacctgcaccgcctgccgcacctgcgtgtgctgttctgttcggacaacctgttcaccgaactgccggcgtgcctcggccaatgcgccaaactgagcatgatcggcttcaaggccaaccagatcagccacgtgcccgccgccgcgttgccgccgctgctgcgctggctgatcctgaccgataaccgcatcagcgcactgcccgaggcattgggtgaacggcccttgctgcaaaaactgatgctggccggcaaccacctggcgcacctgccgcaaagcctggccgactgccacaacctcgaactgctgcgcatcgcttccaatcgcttcacgcgcctgccgcagtggctattgacgctaccgagcctgacctggctggcttacgccggtaacccggtggaaatggcggtgaccgtggcgggtgaagacgccacgccggacattccctggtccgaactggaactggccgaagtactgggcgaaggcgcgtccggcgtgatccgcaaagcacagtggacaccctccaatacgcccgtcgccgtcaagctctataagggcagcatcaccagtgacggctcaccgctgcacgaaatgcaggcgtgtatcgccgccgggttgcaccccaacctgatcaaggtcgaaggccgcgtgatcggccatcccgatgaccaggccgccctggtgatggacctgatcgagccgagttaccgcaacctcgcggccctgccgagcctggcgtcgtgcacgcgggatatctacgcaccggacacccatttcagccttgaagtggcgttgcgcatggcccgtggtatcgcctcggtagcggcgcacctgcaccgccacggcatcacccatggcgacctgtatggccacaatattctgtggaatgaagcaggtgactgcctgctcggggattttggcgccgcatcgttccatgccacggcggacaccgaggaaaccagggcgttgcagcgtattgaagtgcgtgcgttcgggattttgctgggggaattgctggagcgggttgaggaacaggtgagcggtgaatggctgacgctacaagcaaggtgctgtcagcccgatgtgctggcacggcctggattcgaagagatcgaagccatcctggcctctatccaactgcgctgacccgatatgtgagggggcaagccccctcccacatgttgaaggttcagccagccaggccgacgaacatatcctgcacgtcatcatggttgtccaggccttcgaggaaggcttcgacttccgccatctgctcatcgctcaaaccgctcaccgggttcttcgagaggtagccgagcttggccgacagcacggtgaaaccctgctccggcaaggctttctgcacggcgtcgaggtcggtggtctcggtgatgaacagggtggtgccctcttcttcgccgtcttcgaaatcctgggcgccggcttcaatggcggccatttccggatcggcgtccgggctgtccggcgaggcttcgatcaggccgacgtggttgaagtcccaggccacggaaccggaagcgcccagctggcccttgcggaacgccacgcggatttccgccacggtgcggttgatgttgtcggttacgcattcgacgatcagcggcacctggtgcggggcgaacccttcgtaggtcacgcgatggtattgcacggtttcgccgagcagaccggcgcctttcttgatggcgcggtccagggtttccttgggcatcgaggcctttttggcctgttccaccaccagacgcaggtgcgcgttggtcgcggtgtcggcgccattgcgggcggcgatggtgatttctttcaccagcttgccgaagatcttgcccttggcattggctgccgcttctttatgtttgactttccactgtgcgcccatgactcactctctttatgtccatcgcgccgaaacgtctactggccggcgctttgggggcagagtttatagcgcaaaaacgcatcgttccaccaaaaaaccgtcagggcgccaactcgaaaaacacctggatcaggcgcaatgcgcggcgccgttccatgcagccgagcaagtgacggttcaccaggccatcaccctggatcggcacggcgcacacccgcgggtcggggctgacctccatcgacgacaccaccccaacgcccaattcggcagccacggcttccgtcaccgcctcgcgactgtccaactccagcagcaccctgggctgtacaccggcagcgagacaagcaccgtcaaacgtgcgccgggtgatggagccgggttcacgcaacaccatgatcacctcatgcagttgctccaactgaacaccctcggcctgcctggcccacggatgcgccaccggcaccagcgcgcagatccgcgattcggccaaaggctgcaggtgcaggccattgcgcggctcgacctcggtcagcaccgccacgtccgcatgctcggacaacagcgccgccagggtttcctgggcgttgcccaggcgcaggttcacggtgatgcccgggtagcgcgcacgcaggctggcaatcatcggcatcaccaagtgcggaccgtccgccgccacttccaggcgcccggtgagcaattggcgattggcttccagcaggctctgcgcctcgtccaccagaccgaagatcgcccgagtaatggccgccaggcgcgtgccttcctcggtcagttccacgcgcctggcagtgcgacgcaacagcgcgatctggtagtgctcctccagggccttgatatgcccggtcaccgccggctggctgatgaacagccgcgccgccgcacgggtaaaactgccctcgcgggccacggcatcgaatgcacgcagttggaacaggttcatagctatcggcctcactgatagctcgcataacaacaaacaatttgattgatgacaagccaaactgcaatttagacgccgtagattcaaccgatgcttcgcgaggatttgtaatgacgacgcccatcctgctgacccccggccccttgaccacatcgaaccgcacccgccaggccatgctggtggattggggttcatgggacgagcgcttcaaccagctcaccgccagcgtctgcgaacagttgctggcaatcatcgacggcgccgccagccaccattgcgtgcctttgcaaggcagcggcaccttcgccgtcgaagcggccatcggcaccctggtcccgcgcaacggcaaggtactggtgctgatcaacggcgcctacggcaagcgcctggcgaaaatctgcgaagtactgggccgcgatttcagcaccttcgaaaccgccgaggaccaacccaccaccgccgccgatgtgggccgcctgctgcacgccgacaaggccattacccatgtcgcgctgatccactgcgaaaccagcaccggtatcctcaaccccttggccgagatcgcccaggtggtgaaacaccacggcaagcgcctgatcgtcgatgccatgagttccttcggcgcgttgcccatcgatgcccgcacggtgccattcgacgccctgatcgccgcctccggcaagtgcctggaaggcgtgccgggcatgggctttgtcttcgtcgaccaacaggcgctggccgccgcccaaggcaactgccactccctggcgatggacctgttcgaccagcacagctacatggccaagaccggccaatggcgcttcaccccaccgacccacgtggtggcggccctgcatgaagcgctgctgcaatacgccgaagaaggcggcctgcgcgcacgtcatcaacgctacgccaataactgccaggcactgctggacggcatggccgaacggggcctgcgcagcttcctgccggcggacatccaggcgccgatcatcatcaccttccacgccccgcaggacccgcgctaccacttcaaggacttctatgaacgggtcaaggccaagggtttcattctgtatccgggcaaactgacccaggtggaaaccttccgcgtgggctgcatcggccatgtcgatgccagcgacatgcacgccgccgtcagcgccatcgctgacgtactgcaggccatgggtattaccctttcatcgattggagcacacgcatgaactatcaaaaccccaacaccctgcaagccgtgatcctcgattgggccggcaccgtggtcgacttcggctccttcgcacccacgcagatttttgtcgaagccttcgccgaattcgacgtgcaagtctccatcgaagaagcccgtggcccgatgggcatgggcaagtgggaccacatccgcaccctgtgcgaccagccgcaagtcgccgagcgctaccgcaacgccttcggccgcacgcccaccgacgatgacgtgacggccatctaccagcgcttcatgccgttgcagatcgagaaaatcgccgaacactcggcgctgattcccggcgccctcgacaccctcgcccgtttgcgggtgcaaggcatcaagatcggttcgtgctccggctaccccaagcaagtgatggacaaggtggtcgcactggccgccaccaacggctatatcgccgaccacgtagttgccaccgacgaagtgcccaacggtcgcccatggccagcccaggccctggccaacgtgattgcgctgggcatcgacgatgtggcggcgtgcgtgaaggtcgacgacaccgtgccgggcatcctcgaaggccgccgcgccgggatgtggaccgtcgccctgacttgctccggtaatgccctgggcctgacctacgaacagttccgtgcactggacgctgccacactggccagcgagcgcaagcgcatcgaggcgatgttcgcaggctcacggccacactacctgatcgacaccatcaacgacctgcctgcggtcatcaccgacatcaatgcgcgcctggcccgtgggcaaatgccgcagagctactgatagaggtcaacatcacggcacttaccccaggcaaaccgctcaaaaccggcatacagtagaaggactccatcgccaaagaatggagatttgccctgatgagtgaggaacccagcgatgccgtggaaaaactccgatacacgctacagcaccatgtcgattgcgttgcactggttgatggtggtgctgctggcggtggtctacgcctgcattgagttacgcggccagtttcccaaaggcagcggtgcgcgaacgttgatcgtcgagatgcacttcatgttcggccttaccgtgtttgtgctggtgtggttgcgcctgttcgcacgcagcctgggagtggcgccgaagatcgtaccggcgccgccgccatggcagagcctgttggcgacgctgatgcacgttgcgctgtacgcgttgatgatcggcatgccgattgcgggttggctgattgtcagcgccgaggggcattcggtgatgttctatggcatggaattgccgccgctgatcgcggaaaacaaggcgctggccaagcagattgaaggctggcatgtgctgttcggcaagatcggctactggttgatcgggctgcatgcgctggccgggatcgcccaccattacatcctgcgggacaacacggcgttgcggatgatgccgggcaagcgcgctaacccttgaagcctcgctggccttgcagcccgccggtgtggacgaagaccaggcgagtgccgggggcgaagcgcccggcttcgatccgggtcttcaaggccagtaacgccttgccggtgtaaagcggctccaagggtacgccgcaggcctgctgggtggtgtcgatgaagtcgagcaactcggggtcgactttggcgaagccacctcgactggcgtccagcagttcatagcctccctgcacgatggcctcgacgttctgcgccacaccgtgatcgtccggcaccgccatggcgccgtacaccgggtgcgcgcccgcctctgccagtgccaggccggccagggtggtgccggtgcctgccgccagccaccaggcgtcgtaatccgtccagcccacgctgtgcaactgtgcacgcacctgctcgaccagcaccgcgcaacccagggcgcccgcacgaccgccgccgccttcgggcacggggtgcaggttgggatactgctcacgccacggcaaccagaaacccgactcatgccgcgcgcgataaccgccatagcccagccaatgcagctgcatgccgaaggctttcaggtcgaggacggtgggggtgtcttgcggatgcccgcgcagcaggccgacggtagggaaaccgaagcgcttgccagccgcggccagggcatgcagatggttggaataagccccgcccaggctgatgaggccgcgagcggcttgcgcctgcgccaggtgcccggtgagcttgaaccacttgttgccgctgatcagcgggtcgatgcggtccaggcgcaacacggccagctcgacacctctgagccaatccaggtgcagcggttcaagcggtgcgtggggaagccaatcgaagggacccatcgggcgggatctgcatgaaaaacggggcggtagtctaccaccgccccgcccagggtcttacagctcggcggcgaggcgcgagccctggttgatggcgcgcttggcgtccagctcggccgccacatcggcgccgccgatcaggtgcacattctggccggcggcgagcaggccgtcgtgcagttcgcgcagcgggtcctggccggcgcaaatcacgatgttgtccaccgccagcacctggggttcgccttcggcgccaatgcgaatatgcaggcctgcatcgtcgatcttcaggtactcgacactgttgagcatctgcacctgcttgttcttcaagccggtgcggtggatccagccggtggtcttgcccaggccgtcgccgaccttggaggccttgcgttgcagcaggaacacgtcacgcgccggtgcatggggttgcggcttgatcccggccacgccgccacgggcttgcagccgggtgtcgatgccccattccttccagaatgcttcgcggtccaggctggtggaaacgccctggtgcacgaggaattccgacacgtcgaaaccaataccacccgcgccgatcaccgccacacgcttgccgaccggtttgcgctccaggatcacatccaggtagctcagcaccttggcgttgtcgatgcccggaatcgctggggtacgcggtgcgataccggtggccaggatgatctcgtcgtagccacccgccgccagttgcgccacatccacgcgggtgttgaggcacagctccacatgggtggtctgcaatttgcgtttgaagtagcgcagggtttcgaagaactcttccttgcccggcacccgcttggcgatgttgaactggccgccgatctcgctggcggagtcgaacaacgtcacctggtggccacgctcggcggccaccgttgcggcggccaggccggcaggaccggcacccaccacggcaatcttcttgatctgcttgaccggcaggtagttgagctcggtttcgtagcacgcccgtgggttgaccaggcaagtggtcagcttgccgccaaaggtgtggtccaggcaggcctggttgcagccgatgcaggtgttgatttcatcggcgcggccggcggcggccttgttgacgaactccgggtcggccaggaacgggcgcgccatggagaccatgtcggcatcgccctcggcaagaatctgctcggcgatttccggggtgttgatgcggttggtggtgatcagcggaatctgcactgcaccgcgcaacttggcggtgactttgctgaacgcgccacgcggcaccttggtggcaatagtcgggatgcgcgcttcatgccagccgataccggtgttgatgatcgtcgcaccggcgccttcgatggccttggccaactgcacgatctcttcccaggtgctgccaccttccaccaggtcgagcatcgagaggcggaagatgatgatgaaattcgggcccacggcctcacgcacgcggcgcacgatttccacggccaggcgcatgcgattttcgtagctgccaccccagcggtcggtgcgatggttggtatgggcggcgaggaactggttaatgaagtagccttcggaacccatgatttccacgccgtcgtactcggcgacctgggccagcagcgagcaggtgacgaaatcctggatctgcttttcgatgccctcttcgtccagttccttgggcttgaacgggttgatcggcgcctggatcgcactcggcgcgacctgtttggggctgtaggcatatcggccggcgtggaggatctgcatgcagatcttgccacccgccgcgtgcaccgcctgggtcacgatcttgtgtttctgcgcttctgcgtcggtggtcagcttggccgcgccggcatacacaccgccctcgtcattcgggccgatgccgccggtgaccatcaggcccacaccgccccgggcgcgctcggcaaaataggcagccatgcgttcgaaaccgccgggtttctcttccaggccggtgtgcatcgagcccatcagggtacggttgcgcaaggtggtaaaacccaggtccaacggggccagcagatgcgggtaggcagcagcggtcatggtcaagctccacaacggatcatcacggggtgtgacgggctcgtgcggcccgccatcggtttatgtcccacagactaaaaggcggtggatgacggctcaatgactgaaactgacaagttattgatccaaatgcacagcgccccttggcaagcccgcccatgggccctaccctagtcggcgaaccctgcacacggtctgttgtctgttcccccatgcgtaaacttcttgcttttaccgtctccctggcgctggttgccgccatcgccgcgtatctggtctggacccaggagcgccccgtggcgcattacctgtcggaccttcggatcaccctggccgtcaacgaaggcctgcctgctgaccgcggcaacctgctgggcatccagccggagctgtttcccgccgactaccagagcctggaacgcctgcacctgaagctcgcggcctacctgcaaaaagcccgggaccaggggctgatcaacgacaagaccatcgtggtgctgcccgaacatatcggcacctggctgatgctcaccggcgaaaagaacgaggtgtaccaggcgctccatgtgaaggatgcgatgaactggctgtcggtcagcaacccgctgctgttcgcccgcgcctggatcagcgccaccggcgacaaccgcaccgacgacgcctacctgcgcatgaaagcctcgggcatggcgcgggactaccagctgttgttcggcggtctggccaaggaattcggcgttacgttggtggccggctccatcaccctgccgaacccgagcgtgagccagggtcaactgcaggtcggccatggcgccttgtataacgccagcgtggtgtttgccgccgacggcttgccgatcggcgatccgcagcgccagctctacccgatctacgatgagcgcggcttcatcaagcctggcgatgaaaacatcgtcagcgtggtcgacaccccggccgggcgcctgggtgtactggtcggcagcgacagctggtacccggacaactaccgcaagctcaacgaacaaggcgcgcaattgatcgcggtgccagcctttgtgctggggcgcgacacctgggaccgcccttggcgcggcttcaaaagcgtgtccaccccgaccgaaatcagcctcaagcccgaagaactcagtgagggcgaagcctggcgccgtcttacgctgatcagccaacagccgatcagccaggccagcgccggcatgagcgtgttcctgcgcgggcagttctgggacctgggcaccgccgggcacagctttctcagcagcaacgggcaaatcagcgccgatggcgaggcccgtggcgcgcgcttgttgaatatctggttgtgaaaccggtacggctgggggacctgtcggtgggcttcgtgcacagcctggccgatgccatccacagccacggcctggacccgcagccgctgctgctgcaatacggactcgacccggcgcgcctcgccgaagccggtgcacgcttgtcgatcccgcgctacatgcgcctgggccacgccgccatccagctcaccggcgacccaggcctgggcctgcgcatgggccagctcagccgcttgagccaggcgggactggccggtgtcaccgcggcccaggcgcccactgtgcgggaggcggcgcgcgcattaacgcgcttcgaggcgctatatggctccaactatcgcgggcagtcgagcttcgtcgaggatgccgagggcgcctggctgcgcttctactccatcagcccctacaacgcctacaaccgctttgtggtggactcgatcatcgccggctggctgcatcagttgtcgagcctggcccagcaaccggtgcaggcgcagcgcatcgacatcgagttcgaggcgccggagtacagcgaacgctacgacgcgctgggagacgttcacttcggcgccgacgccaatcaactgcgcctcgaccagcacaccctggccctgcgcaacccgcagcactgccccagtacctggaacctgttgttgcagctgtgtgagcgagagttggagcaactgacccgcacccgcagcctgcgcgagcgcattacccgtttgctcgggccgatgctcaatggcggccgggaacccgacctcgaagaagtggcggcacgcttgaagctgccgacctggacgctgcgccgcaaactggccgatgaaggcactcagtttcgcgcgattctcaacgatacccgccgcgacctggccatgacctacattcgcgatacggaactggcgttcggcgagatcgcctacttgctcggttttgcctcggcccaggcgtttcaacgggccttcaggcggtggaacaaccagaccccaggggaatttcgccgcagtcagcggcattccgcctgaagtcggtcttacagctctgtagcgtcgtctgccggttccagcgggtccaactcaatcgcgtggtactcgagcagttcttcctggtaatcgtccatgccggactccttcttgagttaacaggggttgcagataaatgacctgcatcaccagcctaaagtgccgtgatgacgaaaaaatgtcgacgtcatgacgttcctgcactcaagaatcaaacgtagcagccttgtgcggatttagcctctgcgaattactgcgcaggcgtcggcaggggcggaatcgcttctgtcggcgccggcaggtccgggttgctggtggccggcgcgggttccgcctgcggcgcaagcggcgcagcctcggcaggcggcgtgacgggctgggacaccgctggctcttccttcggcggctcggttttctctgccgccggtgcggttttaggttccggcacacccagctcggctttcggctgctcggggatatgcgcggccttcttcacttcctgaggcaggaacacgtccaccagcgcaaagtagcgctcgtagaatttcggcgccgaaacggtctcgctcgccacctttaccatggaatcatcggtggaaccgatcggcatcgataccgaccccagcacgcccacacccaggctcgcggagttgttgaccttcttcagcgcgtaacggtcctgcaaggcgttggcgaacatggtcgagtgattggtgcctttgccatcgtcggcacacaccacgttgaagctgatctgcaggtgggtctcgccggtctgctggaagctcttgttgcccaccaccagtttcggatcgctgctggtgatgatgtagccctggctcagcaaggcacgtcgcgccgcttcgcacgccgccacatcggtgaccgggtaatcgcgggaaaacgtaccggagtcgtcgaaattctcatgttcataaatggcggtcttgggtgacgagcagcccgcggcgcccgccagcaccagcgccagcccgaggctacgcaagtgaaatgatgtcgacattgaaaatcctgaggaaaacggtccgggcggtattgtgcaacagaacgaggccttggcgcgcgcattcctgtcggtaaaacgtcacagccctaccgcgtaccggccgtaggaaaaagccctgcacacatatgatcaataaacacgcgcaatttgaccgaagcatggcgacttgatggccataacatccagaaactgccccggtgttccaggcagtcatccagcaccctttgcagccgcccgtcctggacggcctgattgaccatgtagtctggcaggcaagcgatccccaacccttcgagtaccacatgcttgagcgactcgatcgtggtgctgaccaacggggtgcgcaggactggctccgaggcgccgggcgccaggcgtaacggccagggctccagcttgccggtggcgcagaacttgtggcgcaggcaggcatgcccgttcaagtcctgcggctgttgtggcgtaccgtgctggcggaaataggccggcgtgcccaccagcaccaactggtagtgtcccagatggcgcgccatcaagcgcgaatcttctggcttgccggtacgaatcaccgcatcgaacccttcttcgatcacgtccaccatgcggtcggaaaaatccacatccagctcgatttccgggtaggcgcgcatgaagtcgctgagcaccggcatcagcaagccgcgcacctgcggcacgctgatgcgcaacgtgccacggggcatggcgctggcgtccgtcagctcccgctcggccgcctcgacctcggccaggatccgccgcgaacgctccaggaacagcacgccttcactggtcaacgtgatgctgcgggtgctgcggtgaaacagccgtacgcccagacgttcttccagccgcgcaatgctcttgccgacggccgacgacgacacgcccagcacacgcccggctatggtgaagctacgcgtttctgccacctgtacgaatacagagaggctacccagactgtccatgagcgagtccctggaaattgcggactccaacgtccgataagttcggaaccttagcctgtttttccgtagaccacagccccctactctgtcgacttgcccatttgcatggatagagcgcgatgacctccctcaccgattccgccgtgactgcccgaaaagaaacactgccgctgggaggattactggccctggccagcgccggctttatcactatcctcaccgaagccatgcccgccgggctcctgccgcagatgggcgacggcctcggcgtatcgcccgcgctggtcggccaattggttacgctgtacgccctgggttcgctgctggcggccattccgctgacgctgttgacccgaggctggcgacgccgccccttgctgctggtcgcaatcggcggctttgccctggtcaacagcgtgaccgcgctctccagccactatgggctgaccctggtggcgcgtttctttgccggtgtattcgccggactgctgtgggcgctgttggcaggctatgccagccgaatggtcgcgccccacctgcaaggccgggccatcgcagtcgcgatgctgggcgcaccgctggccctgtcgctgggtgttccagccggcacctttctgggggctgcggttggctggcgcctgagttttgcaatcatgaccggcctgacgctggtgctactgatctgggcacgcctgcaactgccggatttcgccggtgaaccggcggggaaacgcttggggctgcttcaagtgttcagcttgccgggtattcgtccggtgctgtgggtgacttttacctacgtgctcgcccacaacattctctacacctacatcgcgccgctgctggtgccggcgcggattgccgccgatattgaccaggtcctgctggtgttcggccttgcagcgttgctgagcatttggctggcgggtgtattgattgatcggtggttacgcccgttgctgctgatcagttgtgcgctgttcggtctggtcgccttggcgctggcgttctggatgaacctgccggcggctatctacctcgcggtcgcgctgtggggcctggcgttcggcggcctgcctgcgttgctgcaaaccgcactggccaaatcggcaggcgaatcggcggacgccgcacaatcgatgctggtgaccgtgtggaacctgggcatcgcaggcggcggactggtgggcggtgtgttgctccaaggctggggcgtcggcgcattcacctgggcggttgtgctgctgatgctactggccctggccggcgcgttacaggcggcgccccaacaactggcccggccacccttcaaggtcgaacgttgaaatacgctgatacccgcacgcctcgtaaaaacgcaccaggtcgcccgtgccgccggcgtaacagtccacgcgcaggcgcttgaccccggcagcgcgggcacgctcatcggcgaaagccaacagctgccgacccaacccacgcgcacgtgcatcacgtgcggcgatcagcaaacgcacatagacttccggctcagacgctggcggtacgtaaggcatgggctcgcccagcacaagtgccgccagcaaccgcccctcaggcgtttcaaccacccaggcaccgggcatggcacacgcgtctgtgacttgcgctacccgccggggcaatgcggaccagggcgtggtgccccattgggcgttattacccatcccgacaaaccaggcaatcacctcgtcaaacacctgcagcacggccggggcatccgctgcgctggcatgacggatcacccagccttcttttccttgaatagacacgcgcgaaactccttggtcggcgataacgaatgaccagtctagcgcacataaaaaagcccccggtcttttcaggccgggggctttttattcaaaccgacatcagaacttcttgatgtcagccttggtttccaactgcttgcggtaggccgcgaagtcctgctggccgacacgggaggcgaggaagcggcggtattgcgccttttcttcgtccgttggcgcagcggcctcgttgacgccgttcaggcgcacgatgaccaggctaccatccgccagggttacagtggtaaaggtcggcttgtccttggccgcaggcttgggcatgcggaacacggcttgcagcacggcagggtcgatcgcttcctggctacgggtagccgcttcattgaccttccaggcctggccgtcgaccggctggttcagcggggtcttgccatcacgcaagctggcgatcagctcgtcagcgtgagtcttggcagccgcgctggcgcgctccttggccatctgcgtgcgaatcgccgctgcgacgctttccagcggcagttgcgaaggcttcaggtgctctttggcacgcagcacgatgatggtttccgggtccagctcgatggcgctgctgttggcaccctcatccagcacttccggactgaacgcagcggtgaccacggcgcggttggccgcaacaccttcgccaccttcacggccaaacggcgcggaggtgtgtacggtcagtttcaggtcggacgccggctgggccaggtcggaggcttcaaatgccgcatcttccaattgcttggtcgcttcgacataacgctgctcgacctgctgggtcttgagctctttggtcagcttgtctttcaggctggcaaacgtcggcacttgcggtgcctcaacgcccaacagtttgatcaggtgccaaccgaagctgctacgcaccggcgccgatacctggtccttgttcaacgcgtacaaggcggtttcgaagtccggatcgtagacgccagggccggcaaagcccaggtcaccgccattgctggccgaacctggatcctgggagaactccttggccagggcttcgaacttctcacccttggccaggcgtgcctggatttcttcgatcttggccttggcttgcgcatcggtcgtcttgtcgttgacttcaatcagaatgtgcgcggcacgacgctgttcagcgaggttggcgatttctttctgataggcggcctgcagctcatcatccttcaccgtaacctggtcgaagaaggaagacttcttcagctccagatagtcgatgaccacttgatcaggggtcatgaactctttggcgtgctggtcgtagtaagccttgacctcatcgtcggtgagcttcaccgccgcagggttggccttgatgttgacggtggcgaaatcgcgggtctgcttttccaggcgggcgaatgccaggacttcggcgtcggtcacgaagccgctgccagcgatgcctgcgcgaacctggccgatcagcatttcctgggtcagcatctgacggaactgcatacgggtgtagcccagctgacggatcacttggtcaaagcgttcagggctgaacttgccatcgacctggaattccggcgtctgcaggatcacctggtccagcgcagcttcagagaagccaaacttggcgtcggcagcgccttgcagcagcagcttgcgatcgatcagacccttgagggccgcgtcgcgcagcagtttttcgtccagcagcgaagcatcgaaatccttgcccagctgttgcatcagctggcggcgttgcatgtcgacggcctggctcagttcggtctgggtgatttcttcaccgttgaccttggccacgtcctgcttgttgttacccgaagcctggaaaatggcctcgataccggtgaacgccatcaacgcgacgatgatcccgataatggtcttggcaatccagccttgtgaattgtccctgatattttgcagcatgcgtcccccagaaacggttgaacttcaagaataggcaaccgtggagcgtgggtagagtacggatataagaaaggcgcatccaaggatgcgccttctcgcaactggcggagcggacgggggttttcgttctccccccggcttggcgacccgatgcatacctgggtctgctggccgctccgctgccaggtcgaacctgcgttcgacccgggtaggtaaaggcttgatcgaagcttagttaacggcttctttcagggctttaccggctttgaaacctggtttcttggcagcagcgatttgcagtgctttgccagtctgtgggttacggccagtgcgagctgggcggtcagtcacagagaaagtaccgaagcctaccagtactacggagtcgccggccttcagagcgccagtgacggattcgattactgcatccagcgcacggccagcagcagctttcgggatatcagcggatgcagcgatagcatcaatcagttccgacttgttcactctaagtccccttatatatctattgagtatgattctaagttttttggtgaaagcaaaaaccagtgctgaatggcctacagacacttaagagccgctttataacaagggctctaaaaagctgtcaaggaagcccccaggctttaacacattaatgcgtgctaattctttccttggaatcagactcacgtttttcgtccttagcaactatctccggagccacatccggcaagggctccggcgcgtattgcagcgcaatttgcaggacctcgtcaatccatttaaccggtttaatctgaagatcctgcttgatattgtccggaatttccttcaagtcgcgaacattctcttcaggaatgatcacggtcttgataccaccccggtgtgcagcaagcaatttctctttcagaccaccgatagccaacacctgaccacgcagtgtgatttcgccggtcatggcgacatcggcgcgtaccggaatgccggtcaatgccgagaccagggccgtgcacatgcctacgccggcgctagggccgtctttgggggtcgccccttccggcatatggatgtgcgtgtcgtgcttctcgtggaagtccagggggatccccaggcttctggcgcggctgcgcaccacggtctgcgcggcagtgatcgactcgaccatcacgtcaccgagggaaccggtcttgatcaattggcctttgcccgggatcacggcggcttcgatggtcagcaactcgccgcccacctgggtccacgccaggccagtcacctggccgacctgatcctgctgctcggccaggccgtagcggaatttgcgcacgcccaggaagtgttccagcgaatcggccgtgaccttcaccgagaagcgtttttccagtgcatgttccttcaccgccttgcggcagatcttcgcaatctggcgctccaggcctcgtacaccggcctcgcgggtgtaatagcgcacgatgtcacggatcgcctcgacctcgaactcgatctcgcctttcttcaggccattggccgacgtctgcttgggcgcgaggtacttgacggcaatgttgatcttctcgtcttcggtgtaacccggcagacgaatcacctccattcggtccagcaacgcgggcgggatgttcatggagttggaggtgcacaggaacatcacatcggagaggtcgtagtcgacttccaggtaatggtcgttgaaattgtggttctgctcggggtcgagcacttcgagcaaggcagacgccggatcgccacgcatgtcgctgcccattttgtcgatttcatcgagcaggaacagcgggttgcgcacacccacctttgtcatcttttgaatcaatcttcctggcatcgaaccgatgtaagtgcggcgatgaccacggatttccgcttcatcacgcacaccgccgagggccatgcgcacgaatttacggttggtggcgttggcaatcgactcggcgagtgaggttttacccacacccggtggaccgaccaggcacaacaccggcccgcgaatctttttcacgcgtttttgcacggcgaggtattcgaggatacgttccttgacttcttccaggccatagtggtcggcatcgagaatgtcctcggcacgcgccaggtccaggcggaccttggtctgcgccttccacggcacctgcaccagccagtcgatgtaggagcgcaccacggtggcttcggccgacatcggcgacatctgcttgagcttgttcagctccgcagtggccttggtcagggcatctttcggcaggccggcggcatcgatgcgctttttcagctcttcaatttcgttgtggccttcctcgctgtcgccgagctccttctgaatggccttcatctgctcattcaagtagtactcgcgctgactgcgctccatttgtttcttcacgcgaccacgaatgcgcttctcgacctgcaacaggtcgatctcggcatccagcagtgccagtacatgctcgacacgggccggcaggtcgatgatttcgaggatgtcctgcttctgctcgatcttcagcgccatgtgcgcggccatggtgtccaccaggcggcttggctcatcgatgctgttgagggaggacaggacttcagccgggactttcttgcccaactgcacgtactgctcgaactgcgagagcaggctgcgtacaaacacttcggactcgcgctcaggggcctcgacttcgtcgatcagcgccacttcggcgcgcaggtggccgtccacctccatgaaccgctcgaccgcgccgcgctgctcaccttccaccagcaccttgacggtgccatcaggcagtttgagcagttgcagcacggtcgcaatggtaccgacgcgatacagggcatcttcgcctggatcatcatcggcaggatttctctgggccaacagcaggatctgcttgtcgcccgtcatcgcggcctcgagggcttcgatagacttctcgcgccccacgaacagcgggataaccatgtgcggatagacgacgacatcacgcaacggcaggagaggcaattcgatggttgtcttcatgatttcgcctctatgacagttcaaaaattagcttgaaaccaagatgggggctgcatgcaaaaaaaacaagcttattgccagcagttaaacgcagtaaacgctccggcgtaaaaaacgccgtaaaaacaaaggggcccctggaggccccttgtttataccgacactgcgaaacgcttacgcgtcgggcgcagctttggcagccttggcagccggctcactgttttcatagatgtacagtggcttggacttgccttcgatcacgctttcgtcgatcaccactttactcacctcggactgcgaggggatttcgtacatggtgtcgagcaacacgccttcaagaatcgaacgcaggccacgtgctccagtcttgcgctccagtgcccgcttggccactgacttgagtgcatcggtacggaactcgaggtctacaccttccatctcgaacaacttggcgtattgcttggtcagggcgttcttcggctcggtgaggatctgaatcaaagccgcctcatccaattcgtccaacgtggccaggaccggcagacggccaacgaattccgggatcagaccgaacttgaccagatcgtcaggctcgacttcacgcagggactcgcccaccttcttgccttcttccttgctgcgcacttctgcactgaaaccaatgccaccacgggtggaacgctgctggatcactttttccaggccggagaacgcgccgccacagatgaacaggatgttgcgtgtatcaacctgaaggaattcctgctgcgggtgcttgcggccgccttgtggcggtacggaagcgaccgtgccttcaatcagtttcaacagtgcctgctgcacgccttcaccggaaacgtcccgggtgatcgacgggttgtccgacttgcgcgagatcttgtcgatttcgtcgatgtagacaatacccatctgggccttctctacatcgtagtcgcacttctgcagcagtttctgaatgatgttctcgacatcttcacccacgtagccagcctcggtgagggtggtggcgtcggcgatggtgaacggaacgttcagcaggcgagcgagggtttctgcaagcagggttttacccgagcctgtaggaccgatcagcaagatgttgctcttgccgagttcaacttcgtcgcctttcttgtcacgctggttcaagcgcttgtagtggttgtataccgctacggccagaaccttctttgcacgctcttgaccaatcacatactggtcaaggatgccgctgatttctttaggcgaaggcaatttatgcgcgctgctctcggcctgggcttcctgcacctcctcacggatgatgtcattgcacaggtcgacgcattcgtcgcagataaacaccgaggggccggcaatcaatttgcgtacttcatgctggcttttgccacagaaggagcaatagagcagcttgccgttgtcctcgccgttgcgggtgtcagtcattcgttcgatccaaatccgataggcttgcaacacaagatgaaggcttatgcgggctttttcaagcccgccagtggtcggacatgccgaccagccctattttgagcggcttatattaagcgggacgctgggtgatcacttcgtcgatcaggccgtatgccttcgccgcatcggcactcatgaagttgtcgcggttggtgtcgcgctcgatttcttccagggtgcgcccgctgtgcttggccatcaacgtgttgagacgctcgcggataaacaggatctccttggcgtgaatctcgatatccgacgcctggccctggaaaccgcccagtggctggtgaatcatcacgcgcgagttaggcaggcagaaacgcttgccctcggcaccggcagtcaacaggaacgcgcccatgctgcaggcctggccgatgcaggtggtcgacacgttcggcttgatgaactgcatggtgtcgtagatcgacatgcccgctgttaccgaaccgcctggggagttgatgtagagatggatgtccttgtccgggttttccgcttcaaggaacagcagctgcgcacagatcaggttggccatgtagtcctctacggggcccaccagaaagatcactcgctccttgagcaggcgcgagtagatgtcgtaggcgcgttcgccacgagcggactgctcgacaaccatcgggaccaggccgccagcggcctggatatcagagttctgctgaatataggaattacggaacatgctctgcagttactcccaaatagtcatgtcttgaaaacgcataagccagcgcgaggctggcttatggttgaatttccaacgagttggacaatcagtcggcttgtgctgcttccgccggtttgactgcttcttcgtaagagaccgctttatcggtcaccttagccttctgcagaacagtatccacaacttgttcttccagcacaaccgaacgcacttcgttcagttgctgatcgttcttgtagtaccaagccacgacctgctcaggctcctggtaggccgaagccatttcctggatcatttcgcgaacgcgatcttcgtctggcttgaggtcgaactgcttgaccacttcagccacgatcaggcccagcacgacgcggcgcttggcttgctcttcgaacagctcggccggcagttggtcaggcttgatgttgccaccaaactgctgaacagcttgaacgcgcaggcgatccacttcgttggacagcagggccttaggcacttcgatcgggttggcggccagcagaccgtccatgacctggttcttgaccttggatttgatggcctggcgcagctcacgctccatgttcttgcgaacttcggtgcggaaaccttcgataccggtttccttgataccgaattgcgcgaagaattcttcgttcagctctggcagcttaggctcggaaacggtgttgacggtcacggtgaactcggcggctttgccagccaggtccaggttctggtagtcagcagggaaagtcaggttcagaacgcgctcttcgccggctttggcgccaaccaggccgtcttcgaaacccgggatcatgcggttggaacccagcaccagctgagtacccttggcggagccgccagcgaagacttcgccgtcaaccttgccaacgaaatcgatgttcagctggtcttcgttctgggcagcacggtcggccacttcgaaacgggtgttctgcttgcgcaggatttccagcatgttgtccaggtccgagtcagccacttcggcgctcaggcgctcgatggcgataccgtcgaaaccggccacttcaaactcagggaacacttcgaatacggcaacgtattccaggtctttgcctgcttccagggacttaggctcgatcgacggcgaacccgccgggttcagcttttgctcagtgaccgcttcgtagaaagaagcctggatcacgtcacccacagcttcctggcgcgcatcggcaccaaagcggcgcttgatttcgctcattggcactttgcctggacggaaaccagcgatcttggccttctgggcagtctgctgcagacgcttgttgaccgcagtctcgatacgctcagccggcacggtgatgctcaggcgacgctcgatagcagtagtattttcaacagaaacttgcatggatattcctcgttgcacagacgttagccggccatttccgaccccaatcaagggcatgcattctagtgggtcaaactcaagaagtcaccctactgcaaatacacccgaaaacagccagcaatttatcggtacgaaggcactgatgcaccccgccccggtgacaaatacagcccatcacgccagggctctgcgccgccccttctatatatagaagaagtcgtcatccatctccctgacggccaacccttcaaacgggactggcaggcagcgcagcatcatcgagatacataaatacgacgaaacgccctgccgttgcgacccagtgactgcgaccgcggaatattcgaaccgctaaaaccaaaaaaggcgccagactgttaaatctggcgcctttcgaatatggggtggacgaaggggatcgaaccctcgacaacgggagtcacaatcccgtgctctaccaactgagctacgcccaccatattgcgttaacaaagaaaccaaaccacttctttgtctagccttaccctgcttctcaacaaggcgaagctttatttggtgcggatgaagagactcgaactcttacgcctcgcggcgctggaacctaaatccagtgtgtctaccaattccaccacatccgcgcttgaagctcttaaagcaaaggcgccagacgattaatctggcgccttttaaaatatggggtggacgaaggggatcgaaccctcgacaacgggagtcacaatcccgtgctctaccaactgagctacgcccaccatctgacgctacttgtgccaaagctgcctaatggcgcacccggcaggactcgaacctgcgaccatccgcttagaaggcggatgctctatccagctgagctacgggcgccttattaatctgtactcttggaggattacaaactaagtgcttccagccttgcagaacaacacgctattctgctcgaccttcttaaccagtgctaggctgtgcccgacaagtgcgacgaatagtatagacgccctccaaacccgtcaaatcttttttgaaaaaaattcattttatttaaggggttagggcaatttgcagaccaagcgcctttgccctcacgccttggcatgcgagaatgcgcgcacttttcttccccctctcgatggttaatcacgcgtaatgactgcacaacttatcgacggcaaatcaatcgccgccagcctgcgccagcagatcgccaaacgagtcaccgagcgcagccagcaaggcctgcgcacgcctggcctcgcggtgatcctggtcggcagcgatcctgcctctcaggtttatgtctcgcacaagcgcaaagactgtgaagaggtcggctttatttccaaggcctacgacttgccttccgagaccacccagcaggcccttaccgacctgatcgacggtctcaacgacgacccgaagatcgatggcatcctgctccaactgcctctgcccgagcacctggacgcctccaagttgctggagcgcattcgcccggacaaagatgtcgacggcttccacccttataacgtcggccgcctggcccagcgtatcccgctgctgcgcccatgcacgccgaaaggcatcatgaccctgctggaaagcaccggtgtcgacctgtacggcctcgacgccgtggttgtcggcgcatccaacatcgtcggtcgcccgatggccatggaactgctgctggccggctgcaccgtgaccgttacccaccgcttcaccaaggatctcgccggtcacgtcggccgcgccgacctggtcgtggttgccgccggcaagccgggcctggtcaagggtgagtggatcaaggaaggcgccatcgtcatcgacgtgggcatcaaccgccaggaagacggcaagctggtcggcgacgtggtgtacgacaccgccctgccccgtgccggctggatcaccccggtacccggcggtgtcggcccgatgacgcgcgcctgcctgctggaaaacacgctgtacgccgcagagaccctgcacacctaataaccgggcgtactgaaaaagccctgccttatcgcagggctttttattgcccgcaataaaccctatttttcttagtttttaagaactttcgtccggttctagaagaacattcgacagtttctgatccatactcctaaaatgtaacggcatttatccaaaacccgtttccgaacggtatttccttactttttagcgagttcatccgcgtgaaaattcgtctctctattgtcagcctattttttgcgtttacaggcaccttcgctcacgccgccgaaaccacccaggccccgcgtgacacctcgaaactgcaaatcgcctccggcagcgccatgctggtagatctgctgaccaacaaagtcatctactccagcaacccggatgtggtggtgcccatcgcctcggtgagcaagttgatgaccggcctggtggtgcttgaagccaagcagaacatggatgagtacatcgacatcaacatcaaggacacgccggaaatgaaaggcgtgttttcccgcgtgaaaatcggcagcgagatgccgcgtaaagaaatgctgctgatcgcgctgatgtcctcggaaaaccgtgccgccgccagcctggcgcaccactatccgggcggctacccggcgtttatcgccgcgatgaacgccaaggccaaggcgctgggcatgaccagcactcactatgtggaacccaccggcctgtcgatccacaacgtgtccaccgcccgggacctgagcaaattgctcgccgccgcgcgtcactatccgttgctcagccagttgagcaccaccaaggaaaagaccgtgtcgttccgcaagcccaactacaccctgggcttctccaacaccgaccacctgatcaaccgcgccaactgggacatcaagctgaccaagaccggcttcaccaaccaggccggccactgcctggtgctggtgaccagcatgggcaaccgcccggtgtcgctggtgatcctggatgctttcggcaaattcacccactttgccgatgccagccgtatccgcaattgggttgaaaccggcaagagcgggtcggtgccggatgtggcgttgcgctacaaggccgacaagaacctgaaaaatcggccgaatgctgcagaagcgcgtcgataaccaaccattaaaaaacggcgcttgatagcgccgttttttatttgcgctccgccaacaccttcagcgcctgggccgccgcccgctccttcccggcctgggccgtcgcgttagccgcatcccgccagcgctgcgcgtcgacattggctggcaactggctcgggcgctgggtgaggattgcccagtttccggcacttttccattttgactcgaagtcgccgaagctcatcaacaggcgccggtccatgcctgagcgcagcaacaccgtgcttttctgctgattgaaccccaccactaccacgtagtgcgcgtcagaccacagcccgccgccaatccgcgccatcaccggataacccgccgccacctgcgccagcaccgccgtcaactttgcatcgagcgggtacaccatcagcccgtactcacgcgccagcacctgcatgttgcgttcaaggtccgcttcgccacccggcaaatgcaacggcttatccagcaaccccggtgtcatgacaatgccttgttgcgacagcatgctggctaacgatgtaggaccgttctgataagcctcgctacgaaaggtcggcacgccattgagttcgacacgctccggcaggcccgccagcctcgacggtgtggaggaacaggccgctaggcccagggcacaagcaagcaacaaggatgtttgaaggttcgaccgtaaccgcaattttctactctcttgatcgactgccggtaatggccctgatcatagcccaatcgcgtttgtgtagggcgcgtggatatagcaaagaagttggttggactcgaccattggtcaatagcaggcaaccgcccggtagctagactgtccattgagaagactgtgtgtgcccgtaggggcgaaaggaggcccgaatgagccttgcaacgacgattttactgctgatctgcggttggctggcggtagccggcgccatgttgtggggggtgttgcgtattacccgccggcaccatcacccccacgccaaacccgttgcacccgccaagcctcacaaggccgcggtgcatcacgcctagcctggcatgcaattgaagtcctgcgtcgccgcgacttccttgccgtgcccgtccatcaaggaggcgcgcacggtggtgcccaggctggattccaccagggtgtagtgctcacccgctctgaaatgcttgtactcgacacgtccctcgcagtcctgctggttgtcgtcgccgggttcttcctcgaacagcgtcacatccaggcgatgatcccccggcggcacttcaaaaaagcgtccgtcatccacgcgcttgccatctacccgctcggccatcaggtcattcggcgcttcttctttcagaccaatccacgcttcgctcgggtcagccttggggatcgggccggcgcatgccgacaacaacagcgcagcaccgagggcaggaatcaacaatagaggtttgagtgacatggcagggctccaaaacaggacaaggcgtccaatgggttgcaagcttgaggagcagccctttgtagaacaaatgaatacatatgaaacgatcttcagcccttacctaaatgttccttcacctggctgaaaggtgcgtgttaggtgggtcgcgtgagactgccggggtttgcaatcctgctcctttcggaggtttcacgcatgctcgggctggtaaagaccgcactgcaaaagccatacacctttatcgtgttggccatcttcatctgcatcatcgggccgatggcggccctgcgtacccccactgatgttttcccggatatcggcatccccgtggtcgccgtggtctggcagtacaacggcctgtcgccggacgccatggccggtcgggtgatctacacctacgaacgctccctgagcaccaccgtcaacgacatcgaacatatcgaatcgcaatccttgcccggcatgggcatcgtcaagatcttcttccagcccggcgtggatatccgcaccgccaatgcccaagtgacggcggtttcacaaaccgtgctcaagcaaatgccacccggtatcacgccgccgctgatcctcaactacagcgcctctacggtgccgattctgcaaatggcgttttccagccccagcctctcggaagccaggatccgcgacctggtgcagaacaacatccgcctgcccctcagcgccctgcccggcctggccatgccgacgccgatgggtggcaagcaacgccagatcaccctcgacctcgacccgcaagcgctggctgccaaaggcctgtcggcgcaggacgtgggtaacgccctggcactgcaaaaccagatcatcccggtgggcaccgccaaactcggccccaacgaatacacgatcctgctcaacaacagccccaaggccatcgacgaactcaacgacctgccgatcaagaccgtcgacggtgcgctgatcacgattggccaggtggcgcacgtgcgtgacggctcgccaccgcagaccaacatcgtgcgcgtcgacggccaccgcgccgtgctgatgccggcgctgaaaaacggcagcatttccaccctgtcgatcatcgatggcatccgccagatgctgccgcgcatcaacgaaaccctgccgccgtcactgaagacctcgctgctcggcgacgcttcggtgttcgtcaagcaatcggtgggcagcgtggcccaggagggcatcattgccgcactgctcaccagtgcgatgatcctgctgttcctcggcagctggcgttcgacgctgatcatcgccgcgtcgattcctctcgccgtgctctcggccatcgcgctgctggcggccagcgggcaaaccctcaacgtgatgacgttgggcgggctggcattggccgtgggcatcctggtggacgacgccacggtgaccatcgaaaacatcaactggcacctggaacaaggcaaggcggtgaagaccgcgatcctcgacggcgccgcgcagatcgtcggcccggcgttcgtctcgctgctgtgtatctgcatcgtgttcgtaccgatgtttttgctgcaaggcatcgccggttatctgttccggccgatggccctggcggtgatctttgccatggccagttcgttcatcctctcgcggacgctggtgccgaccctggcgatgttcctgctcaagccgcacacgccggagccaggcgccgggcatcacccggaagatgagttcatcaaccaccacgagggcgagcagcacccgaaaccgcgcaatcgcgtgctgcaatcggtgctgaatttccagcagggcttcgagcgtcacttctcgaatatccgcgacacctaccacagcctgctgaccttggccctaggcaaccgcaagcgttttgtcgtcggcttcctggcctgtgtactggcgtcgttcctgctgctgccaagcctgggccaggatttcttcccggccaccgacgccggcgccctggccctgcatgtgcgcttgccactgggcacgcgcatcgaagaaagcgccgcggccttcgaccgcatcgaggcgcggatccgcgaaatcatccccgccgaagagctggacaccatcgtcgacaacatcggcattccgctcagcggcatcgacatggcctacagcagcagcggcaccatcggtccgcaggatggcgatatccaggtcaccctgaaaaaagaccatgcccccaccgccgactatgtgaaaaaactgcgtgaagccttgccggaaagctttcccggcagccacttcgccttcctgccggcggacatcagcagccagatcctcaacttcggcgcccccgccccgctggacgtgaaaatctccgggcgcaacgacgaagagaaccgcgcctatgcggtagaactggagcgccgcctgcagcatgtacccggcatcgccgacctgcgtatccagcagtccaccggttacccgtcgctgcaggtgaatgtcgaccgcctgcgcgccaatggcctgggcatcaccgagcgtgacgtgaccaacagcatggtcgcctccctcgccggcagttcccaggtggcgccgacgttctggctcaacccggccaacggcgtgtcctactccatcgtcgcggctaccccgcaataccgcctcgacagcctgccctcgctggaagccctgccggtgaccggtgccgacggccagtcgcagatcctcggcggcgtagccaccatctcccgcgtgcaaagcccggcggtggtcacccactacaacatcgagccgaccctggacctgtacgccaacgtacaaggccgcgacctcggcggcgtggcccgcgacgtgcagaaagtgctggatgacaccgcctccatgcgtcccaagggcgcggtgatcagcctgcatgggcagatcgatgcgttgcatgaggcgttcagcggcctgagctttggcctgctcggtgcggtggtgctgatctacctgctgatcgtggtcaacttccagtcgtgggtcgacccgttcgtgatcatcaccgccttgccggcggcgctggcggggatcgtgtggatgctgttcctcagcggcacgtccttgtcggtgccggcactgaccggcgccatcctgtgcatgggcgtcgccacggccaactcgatcctggtggtgagcttctgccgcgaacgcctggccgaacatggcgatgcgctcaaggcagcgctggaagccggctacacgcgcttccgtccggtgtgcatgaccgccctggcgatgatcatcggcatgttgcccctggcaatttccgaagagcagaacgcccctcttggccgtgcggtgatcggggggttgattctcgccaccaccgccaccctgttgtttgttcccgtggtcttcagcctggtccacggtcgtcatcctacccgcgcagttgctggagaaagcccacatgtcgtctgatcacaaaccctcgcgcaagcgtctgatgctcatgggtgtcggcggcctgaccctggccgccctgttggtcgccaacggcctgcacgcccgcaccttgcacgaacagtcggtcaccgcctggaccgagaccgccgccatcccgcaggtgatggtgttccaaccgcagcagaacgcggccggcgataccctgcgcctgcccgcacacttggaagcctggagcaaggcgccgatccatgcccgggtcagcggctacctcaaggactggaaagccgacatcggcacccaggtcaaggctggccaggtcctcgccgagatcgacagcccggacctcgaccagcaactggcacagacccacgcacgcctggtgcaggaacaggccaacgcacgcctggccgccaccaccgccacgcgctggcagaacctgctggccagccactcggtgtcgcgccaggaggccgatgaaaaaacttccaatgccgccgccgccaaagccaacgccgaggccgccgcggccgactacgccaggctgaccgcactggaaagctacaagacgattcgcgcgccgttcgccggcaccatcaccgcacgtaacaccgatatcggccagttgatcaaggccgacaccgacagcgacccggaactgttcaacatcgccgacacccaccaattgcgcctgtatgtgccggtgccgcagaactacgcggcggtcatccaccccggcctggaagccgaattgactgtgcccgagcatcccggcgagcacttcaaggcgcgcctgatcggcgactccaccgccatcgaccgccgttccggcaccctgctcgcgcagttcgtggccgacaaccccaacggcgagttgctgcccggtgactatgccgaagcgaccctgccgatcccggcggacacccatggcgtgagcatcccggccagcgcgttgatcttccgcgcccagggcacccaagtggcggtgctggacgcgcagaatcacgtgcacttgcaggacatccatatcggcctcgacctcggtgaacgcctggtcatcgaccaaggcctgaaacccgccgaccgtgtggtcgacaacccgcccgacgccctgcgcgaaggcgacccggtgcaactggccgacgccgctggaggttcgcatgcgcccaaggcttaagcccctcgttgcactgatgctgctggctctacagggttgctcgatggcgcccacctacaaggtgccgccgattgacctgcctgcgaactatcgcgagcagaccagtgacggcccctggcacagcgcgcaaccgtccgatcaactggcacccgaatggtggcagctctaccacgattcacgcctgaatgacctgcaacagcaactgctcaaggccaaccccgacctagcggcggcactggcacacttcgacgcgtcccaggcgtatgccagccagctacatgccggcctgttcccgcagatcaccgccagcgcgcagccgttgcgccagcgccaatcggattcacggccgctgcgggggaccacgcagccgtcggtgtacaacagcaatacagcgggtttctcgctgagttacgacctggacctatggggcaaaatccgcaaccaggtggcggccggcgatgcccaggcgcaagcatcgggggatgacctggcggtggcgcgcctgagcttgcagcatcaactggcgagcctgtatgtgcagctcaatgggctggatgcacaggcgcggatcctcaacagttcgctggatgatttcagccaggcgctgcaactgacccgcagccggtacgagggccagattgcttcagagctggacctgacgcgagcacagaaccaactcgccgaagccaaggcgcagctggatgaagtccgcgggcaacgcaacctgaccgagcatgccatcggtgaactggtgggcgtggcggccagcgatttctccctgccgccgagcccgcaattgattgcactgccgggcatcccatcgcagctgccaagccatctcctgcaacgtcgaccggacattgcagcggcggaacggcgggtgtttgcggccaatgcgaacataggtgtagcaaaggccgcgtggtacccggatttcagcctgaccgggttgattggcgggcagacgcaaggcgtcggcaacctgctgtccgccggcaatcgctattgggcgctggggccgctggtgaatctgccgatctttgacgggggccgcttgagcgccaacgagcgccaggccaaagccgaattcgaagaggcatcggcgcactaccgcagtcaggtgctgaaggccgtgcgcgaggtggaagataacctggcgcaactgcgggatttgcagcaggaagcgcaggatgaacaggcggcggcggatgcggcagagcatacacaagccttggcgatgaacagctatcaggccggggccgtgagttatctggatgtggtgaccgcgcagacggcggcgctgcaggcgcaaaggacgttgcaggcggtgcagacgcggcagttgcaggcgagtgtggggttggtgacggcgctgggtggtggctggcagccgggtgcttgataaggtgggtcagtcacataactgtcaactgaactaccgcaatcgggggcaagccccctcccacacttgtcctgtgccagacacacaatgtatgaacgccgcagaactaatgtgggagggggcttgtccccttccaccctgctcctgtgccagacacacaatgtatgaacgccgcagaactaatgtgggagggggcttgcccccgatggcgttcttccagacacatcctgccaaaagccagcccgtcagccttttacgcaccgatctagcctctctgaacacaccttgagagggccagggaatggcagatttacccgcttcacatcggctgcgcatcggacgcttcagcgaacccaaccgcatctacctgatcaccaccaacacccacgaacgcctaccgatattcagcgacttccacctcggtcgactggtggtctggcagtttcgcctggctcagtaccgagggctcgcaaactccctggcgtgggtgatcatgcctgaccactttcattggcttattgagttgaaaaaaggctcgttggcggacctgatgcggcaggtaaaatccaagagcacgcggtccgtcaacggcctaagcggacgcaagggaagactctggcaggaaagcttccatgaccgggcactgcgcaaggaagatgatctagtgaagatggcgaggtatgtagtggccaatccattgagagcaggcctggtgaaaaagatcggcgactacccattgtgggatgccatctggatctaacatcacacactgttcaaatgtgggagggggcttgcccccgataacagggtgactgacccaccgctatcgggggcaagccccctcccacatttttttctaccgtatttcaggcggctaacttgccgctggcgattgcggcggaagctgccaccattgcgcgtaatagaaccgcacacccagcagccaggtcatccggcgcggcattctcgatttcgttgtggctgatgccgccctcgcacggtacgaaaatcatccccgccgggccaagttcggcgacgaaaattgcgtcgtgccctgccccactgacgatgtccatgttcgacaagcccaggccattcgccgcattgcgcaccgcgtctacgcagccctgatcgaaatacagcggcgggaagtcagcggtgggctccatctcgaaactgagcccatgcttggtgcaggtgtcctcaatgaccttgcgcacctcactgatcatcgagtccaggcgggccggctccaggtgacgaaaatccagggtcatgcgcacttcaccgggaatgacgttgcgcgatcccggataagcctgcaggcaacccaccgtgccacatgcatgaggttggtgccccaatgcagctgcgttcaccgccgccaccaccgctgccgcgcccaccagagcatccttgcgcaggtgcatcggcgtcggccccgcatgcgcttcaaccccccgcagtttcaggtcgaaccacttctgccccaaggcgccgagcaccacaccaatcgtcttcttctcatcctcaagaatcggcccttgttcgatatgcgcctcgaaatacgctcccaccttatgcccgctcacaggccgcgagcccgcatagccaatcgcattcagcgcatcgcccacgctgacgccatccacatcgaccttggccaaggtatcggccagggtgaatttctcggcaaacacccccgagcccatcatgcatggcggaaaacgcgagccttcttcattggtccacaccaccacctccaacggtgcctcggtctccagcttgagatcattgagcgtacgcagcacttccactcccgccagcacaccaaaacagccatcgaacttgccgccggtgggctgggtgtcgatatggctgccggtcatcaccggcggcaggttggggttgcgtccggggcggcgggcgaagatattgccgatgccgtcgacggtcacggtgcagccggcgtcttcgcaccactgcacgaacagatcgcgggccttgcggtcgaggtcggtgagggccaggcgacacacaccccccttgggcgtggcgccgagcctggccaggtccatcagcgattgccacaggcggtcgcggttgatgtgctgatcggtggattgcagaacgtccagggcagcgttcatggggatctcctcaggctacatttcttcttatggattgacggtgaccggcgtggccccgcgcttggcattcaggccgtaatacaacaacccacccagcgccgaaccggtaaaccagccatagctgtagaaccagctgaacgcatcgctgcccaacgacagcaaggtcagcaccaccggcacgccgaacgcgatgaaaccgctccagttccatgccgggtacaggtcatcgcgatacaggccggccaggtcgagttgctgtttgcgcgtgatgaaatagtccaccaccatgatcccggcgatcggccccaacaggctggaatagccgagcaaccagttggagtagacggtctccaggctcacatcggaaacaatcaggccgagttttttcagcagctcatgggccatcaacgccagcccgaccaggccggtgaggatcaccgccgtggtgcggttgatcagcttgggcgcgatgttctggaagtcgttggtgggcgagacaatgttcgccgcggtgttggtggacaaggtggcgacgatgatcagcgccatggccacggccacccacaccgggctctggatatgcccgatcagggtcaccgggtcggacacgctgacgcccaccagtttcaccgaagcggcggtcatgatcacgccgagggcggcgaacaggaacatggtcagcggcaggccgaaaatctgcccgaggatctggtccttctggcttttggcgtagcggctgaagtcaggaatgttcagtgacaaggtagcccagaaccccaccatcgcggtgagcccggccatgaagtaaccggtgaggctcgcaccctcgggacgcttgggcgggatcgccatcaattcgctgatcgacacgttgggcatcgcccacaccagcaggccgatccccaccgccaccagcaacggtgccgacagggtttccaggcgcttgatcgactcggcgccacgcagcaccacccacaggttcaggcaccagaaaatcatgaagccgatcacctcgcccgtgccgccaagggacttccacccctcgaagatcgagcccaggaacaggtggatcgccaacccgccaaacatcgtctggataccgaaccatccgcacgccaccagtgcccgaatcagacacggcacgttcgaaccaaggatgccgaatgacgagcgcagcaacaccggaaacggtatgccgtacttggtgcccggaaaggcgttgagtgtcagcgggatcagcaccacgatgttcgcgagcaggatcgccatcagcgcctcgcccaccgacaacccgaaatacgcggtgagcaccccgcccagcgtgtacgtgggcacgcagatcgacatgccgacccacagcgcggtgatgtgccacttattccaggtgcgttcgtgcaccttggtcggtgccatgtcgtggttgtagcgagggctgtcgaggacgtcggggccggcgtcgagttcgtacaggccgttgcgctcaatgacttgcgatctgttctgttgcatggccgctccacggttttttcgaattattgttgcgcgcctgcagttgagtgcaggcggccggagtacctcgtaaacaacatgacatcacgggcccggccagccgcctctgcactcaataaccgtgccgacaagcgttaccgcaccctcaccgcttatataacgtgctgatgtttatcagctttccgattgcgccttgggtacttgccgcgttactcaggctaaatagtgcggaagttgtccgaaccatcaggactcaatctggtgcaacacaattatttttatttcccctgcccgtcaagaggcatgtctcaagcgtctgatttgcaataagaaatgttgctcaatttaagaacctgtcaagtgcgtcaaaatggtgagaggtcgctacattttggtgattattgatttttatccttataaatcaatagattgaaaactatataggcttataaaaaatcttcttgcccaatcgaaaaactcgggctagtttctattcctgtcaccgatgacaggaattaaccgaccatcggcaagcagcactacaacacttagaactggcacaagccggtcaagcctgtgaggaactcgacatgtcgctgttgatccgtggcgccaccgttattacccatgatgaaagttaccgcgccgatgtgttgtgcgcagacggtctaatccgggctattggtacgaacctggatattcccgccggcactgaactactcgatggcagcggccaatacttgatgcccggcggcatcgacccccatacccatatgcaactgcccttcatgggcaccgtggccagtgaagactttttcagtggtacggcggcgggcctggcggggggcaccacgtcgatcatcgatttcgtgattcccaacccgcagcaatccttgctggaggcgtttcaccagtggcgcggctgggcggaaaagtcggcctctgactatggcttccacgtggcgatcacctggtggagcgagcaggttcgcgaggaaatggccgagctggtcagccaccacggcatcaacagcttcaagcatttcatggcctacaagaacgcgatcatggcggcggatgacaccctggtcgccagcttcgagcgctgccttgaactgggcgcggtgcccaccgtgcacgcagaaaacggcgagctggtgtatcacctgcaacgcaagctgatggcccagggcatcaccgggccggaagcgcacccgctgtcgcgtccgtcgcaagtggaaggcgaagcggccagccgcgcgatccgcatcgccgagaccctcggcacgccgttgtacctggtgcacgtctccaccaaagaagcgctggacgagatcacctacgcccgtgccaaaggccaaccggtctacggtgaagtcctcgccggtcacctgttgctggacgacagcgtctaccaacaccccgactggcagaccgccgccggctacgtgatgagcccgccgttccgcccacgcgggcaccaggatgcactgtggcacggcctgcaatcgggcaacctgcacaccaccgccaccgaccactgctgcttctgcgccgagcaaaaagccgccgggcgtgacgacttcagcaagatccccaacggcaccgccggtatcgaagaccgcatggcgctgttgtgggacgaaggcgtcaacaccgggcgtctgtcgatgcaggagttcgtggcgctgacctccaccaacaccgcgaagatcttcaacctctacccgcgcaaaggtgcgatccgtgtcggcgcggatgccgacctggtgttgtgggacccacagggcacgcggaccatttcggccaagacccatcaccagcaggtcgacttcaacatcttcgaaggcaagaccgtacgcggcgtgcccagccacaccatcagccagggcaagctggtctgggccgatggcgacctgcgcgccgagcgcggggccggacggtatgtggagcggccggcgtatccgccggtgttcgagcagttgagcaagcgggctgagcattccaggccagtagctgtgaagcgctgagaccgctatcgggggcaagccccctcccacattgaccccattccaacaggatcaacgcggtcaagtgtgggagggcgcttgctcccgatgaggccagtgcaagcaacaaaaaaaccactgcccatcagaggcagcacctcaataaccgtgaggccaacaccgtgatccagaccctgacccacctcccccatcccgttgaagatggagcgaccctcgccagccacttcaccgacctggccacccccctcaacgcccgccaggcccaactggaagcctcgcgctgcctgtattgctacgacgcgccgtgcgtgaacgcgtgccccagcgaaatcgatatcccctcgttcatccgcaacatccacaccgaaaacgtgcaaggcgcggcgcagaagattctctcggccaacatcctcggcggcagctgcgcgcgagtgtgccccaccgaaatcctgtgccagcaagcctgcgtgcgtaacagtgccaaagaatgcgccccagtgctgatcggcctgttgcaacgctacgccatcgacaacgcacacttcagcgaacaccccttccagcgcgccgcgcccaccggcaaacgcatcgccgtggtcggtgccgggcctgccggactggcctgcgcccatcgcagtgcgttgcacggccatgatgtggtgatcttcgaagcccgggaaaaagctggtggcctcaatgagtacgggatcgccaaatacaaattggtggacgactttgcgcagaaggagctggatttcctcttgcagatcggcggcatcgagatccgccacggccagcgcctgggggacaacctcacgttgagcgaactacaccagcaattcgatgcagtgttcctcggcctcggccttgccgcgagcaaacaactcggtttggcgaatgaagacgcccccggcctgctcgccgccaccgactacatccgcgaactgcgccaggccgacgacctcacccaactgcccctggccgaccgctgcatcgtgctcggcgcgggcaataccgccatcgacatggccgtgcaaatggcccgcctcggcgcccgcgatgtgaacctggtgtaccgccggggcctggcggacatgggcgccacccaccacgaacaggctatcgccaaggccaatcaggtgcgcctgctgacctgggcccagcccgaagccgtgctgctggatgacctgggtcatgtacgcggcatgcgcttcctgcgcacgcacatggaaaacggccgcctgcaccctaccggtgaaaccttcgaactggccgcagacgcgatcttcaaggccatcggccagggtttcgacaacgaggcgctgcacgacccgctggccgagcaactgcaccgcgtcggcgaacgcattttcgtcgacgagcagctgcgtaccagtgttcccggggtgtacgccggtggcgattgcgtcagcctcggccaggacctcaccgtgcaggcggtgcaacacggcaagctggccgctgaagccatgcacgcccaactcatgctgactgtggaggctgcgtaatgaccgatctctcgattgtgttcgccggtatcaaggcccccaacccattctggctggcctccgcgccgcccaccgacaaggcctacaacgtggtccgtgcctttgaagccggctggggtggcgtggtgtggaaaaccctcggcgaggacccggcggcggtcaacgtgtcgtcccgctactcggcgcactacggcgccaaccgggaagtactgggcatcaacaatatcgagttgatcaccgaccgctccctggagatcaacctgcgggaaatcacccaggtgaaaaaggactggcccgaccgtgcgctgatcgtgtcgctgatggtgccgtgcgtcgaggaatcctggaaaaacatcctgccgctggttgaagccaccggctgcgacggtatcgagctgaacttcggctgcccccacggcatgcccgaacgcggcatgggcgcggcggtgggccaggtaccggagtacgtggagcaagtgacgcgctggtgcaagacgtactgctcgctgccggtgatcgtcaagctcacgccgaacatcaccgacatccgcgtggcagcgcgagcggcgtaccgtggcggtgcggatgcggtgtcgctgatcaacaccatcaactccatcaccagcgtggacctggagcgcatggttgccctgccgatagtcggcacccagagcacccacggcggctactgcggttcggcggtgaagccgattgcgctgaacatggtcgccgagatcgcccgcgacccacagacccagggcctgccgatctgcggcattggcggcatcggcaactggcgcgatgcggcggagttcgtcgccctgggctgcggcgcggtgcaggtgtgcacggcggcgatgctgcatgggtttcggattgtggaagagatgaaggacggactgtcgcgctggatggacagccaaggctacaaaagcttgcaggaattttccggacgggcggtgggtaatacgacggattggaagtacctggatatcaactaccaggtgatcgccaagatcgatcaggcagcctgcattggctgcgggcgttgccacattgcctgtgaggatacgtcgcaccaggccattgccagtctgaaacaggcggatggtacgcataaatatgaggtgattgatgacgagtgcgtgggctgcaacctgtgtcagatcacgtgcccggtggccgaatgcatcgagatggtgccgatagataccggcaagccgtttttgaattggacgcaggatccgcggaacccctatcgggaggctgtgtaggccttaagaccgccatcgggggcaagccccctcccacattttgaataggttcataaatcaaagtgtgggagggggcttgcccccgatgaggccctcagcccccacagagatcaaggctccaacccaatcccccgcaagatcacactggtcaccgtctggatcgccttctcgaactgcatatccgacaacggctggtgatcattcaaaatcttcacctggtgatcaaagtccgcatagtgctgggtcgaggcccagatcatatacagcaggctcgacggctccaccggcaggatgcgcttgtcctccacccactggcgaatcttcgcttccttcatcttggcccagtcgtacaggctttcatccagcgcctcacccagggtcggcgcgccgtggatgatttcgttggcccagactttcgaaccgtacggccgcgtgcgcgagcgctgcatcttggcgcggatgtagctgctgagcaccacccgggggtcatcgaaggtttcaaagctcagggcgtcctgcttccacacttccagcaggtcgaacagcaccgcgctgtacagctcgctcttggtggtgaagtagtaatgcaggttggagcgcggcagttgcacttcttcagcgatatcggccatggcggtgctgccatagcctttttcggcgaagattttctccgcagccagcaggattttttcgacgttgactcgacgaattccgatcttgtgattgcccataagggctccctgacgaagacatgccccagagactaccatccgctctagatcggggcgacaagcgaagtcgaaacttcgtacacttcacgctcctacccattgattggtattgcccaatgttgatcaagaaagccctgactgccgtcgccctgctcgcctccctgttgggcgcctcggccgcatttgcccatgcccacctgaaaaacgccacccctgctgccgacagcagcgtcgcagcgcccaaggacctgcgcctgaccttcagcgaaggcgtcgaagccaccttcaccaaggtgtcgctgagcaaggacggcaccgaaatcgcgatcaagggcctggaaacaccggacgccgacaagaaagtgctggtggtcaccccggccgccccgttggccgccggcacctacaaagtggtgtggaacgcggtctcggtcgatacccacaagagcaacggcgaatacagcttcaaggtcggccagtaacccgtggctaccctgctggtgctgtgccgtttcctgcatttcagcgtcgtgttgttgatgttcggggcctgcgcattcaggccctggctgctcggcgctgcaccgcaaccggcgctggaccggcaacttgagcggatcacccgtggactggcctggctggggctggggtccggcgtcgcctggctgttactgatcaccgcgagcatggccggcagttgggacgcggcgctgcagccggccacggtgcagctggtgctgggcaagaccttcttcggccaggtgtgggtgtggcacctgttgctgaacctgctgctggtgatcgtgttggccaaaccctggccgatggtgcgcctgccagtgatcgcgctgctgctggcgacactggcaccggtcggccatggcgccatgctggacgggctcagcggcagattgctgatcctcaatcaggtggtgcacctggtgtgtgtcggtgcctggctcggcggcttgctgctgttggtgttgatccagcgccaatccccgcctgttgcgctggagccaatcctgcgacgcttcagcggtgtgggttatggcctggtcgccggcttgctggtgactggcttgatcaacgtgcgcgtactcaccgggcaactgtggcccacgccgttattcaacggctttgccctgatcctgttgatcaaggtgctgctggtgctgggcatgttggccctggcgctgctgaaccggctgcgtatcgagcgctgtgaagaacgcttgggcagcctgaaggccagtgtgaagctggagtgggtgctggggattgccgccgtcgccgccgtttccctcctgggcaccttgccgccgatgctgatggttgactgaaacacaccgtcatcgggggcaagccccctcccacattgaacctccacaccgagcaggtcatcgtataacttctacttgacagcgcctgaaaacctcgcaaatatcgcacccaatgttgtacgacaacgtataacaaataataaaaacaacaaaagaaagggagcttcactgtgagttcactcgcgcgcaattcctccgtccgcctgggttttatcggtctcggcagcctggccttcacccttcccctcaacgcccaagccgaaggcttcgtcgacgatgctaaagcgacgctcaacctgcgcaacgcttacttcaaccgcaacttcaccaacccgagcaaccctcagggcaaggccgaagagtggacgcagaacttcatcctcgatgccaagtccggctacaccacaggcacggtgggcttcggcattgatgtgctgggcctgtattcgcaaaagctcgacggcggtaaaggcactggcggtacgcagttgctgccgatccacagcgatggccgcccggccgataacttcgggcgcctgggtgtggcgctgaaaaccaaattatcgaagactgaactgaaagtcggcgaatggatgccggtgctgccgatcctgcgctccgacgatggccgttccctgccccagaccttccgtggcggccaggtcacctccaatgagatcgccggcctgaccctctacggcggccagtttcgcggcaacagcccgcgcaacgacgcgagcatggaagacatgttcatgaacggcaaagccgcgttcacctccgaccgtttcaatttcggtggcggcgaatacaccttcaacgacaagcgcacccaggtcggtgtgtggtacgccgaactcaccgacatctaccagcaacggtatttcaacctgacccacagccaacccgtgggcgactggaccctgggcgccaaccttggctttttcaccggcaaggaagacggcagcgcgctggctggcgacctcgacaacaagaccgccttcgccctcctctcggccaagtacaacggcaacaccttctatgtgggcctgcagaaactcaccggcgacagcgtgtggatgcgggtcaatggcaccagcggcggcaccctggccaacgacagctacaacgccagctacgacaacgccaaggagaaatcctggcaggtgcgccatgacttcaacttcgtggtgctcggcattcccgggctgaccctgatgaaccgctacatcagcggcagcaacgtgcacaccggggcgatcaccgatggcaaggaatgggggcgcgaatcggagttggcctacacggtgcagagtggcgcgctgaaggatttgaacgtgcgctggcgcaactcaaccatgcgtcgggatttcagcaataacgagttcgacgagaaccgcctgttcatcagctacccgatttcactgctctaaaggtgacagaagcagtgcgacgattcgcacttgccccccgtggcggcggaccagaggcatatctgctgcctgacacactgccatcgggggcaagccccctcccacatttgagcaatgccagcctgaagagcgttgacaagccggggaatcaataacgatacttcggcaaagtcatacgacaacctacaacaacaatggaacctacatgaccaccctcaccaccccgcccgttccattcaaccgcctgctgctcaccggtgccgccggcggcctcggcaaagtcctgcgcgaacgcctgcgtccctacgcccacgtgctgcgcctgtcggatatcgccaacatggcgccggctgccgacgcgtccgaagaagtgcagacctgcgacctctccgacaagcaagccgtgcaccacctggtggaaggcgtcgacgccatcctgcatttcggcggcgtatcggttgagcgttcgttcgaagaagtgctcggcgccaatatctgcgggattttccatatctacgaagccgcccgccgccacggcgtgaagcgtgtgatcttcgccagttccaaccacgtgatcggcttctacaagcagggcgaacacctcgacgcccactcgccgcgccgcccggacagctactacggcttgtccaagtcctacggcgaagacatggccagtttctacttcgaccgctatggcatccagaccgtgagcatccgcatcggctcgtcattcccggagccgcagaaccgccgcatgatgcacacctggctgagtttcgatgacctgacccaactgctcgaacgcgccttgtacacgcccaacgtcggccacaccgtggtgtatggcatgtcggataacctcgacacctggtgggacaaccgctacgccgctcacctgggctttgcgcccaaggacagctccgaagtgttccgtgcccaggtcgagggccagccgcccgtagccgccgatgacccggccaaggtctatcagggcggcgcgttctgcgcggccggccccttcggtgattgacccatgaacgccgaattgattgtcgacgcgcgcaatgccgtgggtgaatgcccggtgtgggtgcccgaggaaaatgcgctgtactgggtagatattcccaacggcggcctgcaacgctggagcgccgccaccggccatctcgccgcctggaaagccccgcagatgctcgcctgtatcgcccgtaccgatgcgggcaattgggtcgccggcatggaaagcggctttttccagcttaccccgtacaacgacggcagcctcgacaccacgcccttggctggagtcgaacacccccgtgccgacatgcgcctgaacgacggccgctgtgatcgccagggccgcttctgggccggcagcatggtgctgaacatgggcttgaatgcgcccgagggcatcctctaccgttacgcttccggcgccgtgcccaatgcacaactggacggtttcatcaccctcaacggcctggcgttcagcccggatggccgtacgatgtacgcctcggactcacaccccttggtgcaacagatctgggccttcgactacgacatcgacaccggcacgccctccaaccgccgcgtcttcgtggacatgcacaactacctcggtcgccccgacggcgcggcggtagacgcagaaggctgctactggatctgcgccaacgacgccggcctgatccaccgtttcacccccgacggccgcctcgaccgctccctcaccgtaccggtaaaaaagcccaccatgtgcgccttcggcggcagccgcctggacaccctgttcgtcacttcgatccgtgacgaccagagcccccagtcgctgtccggcggcgtgtttgccctcaaccccggcgttgtcggattgccggagcccacgttcaccctctagctgcatcgctgtgccttgaatacaacaataacaagacaggaatgaacccccatggacttcaaacgcaccttgctcgccgctgcatgcttctccctcgccagcgccgcccacgccctggaaatcaagttcgccgacatccaccccgccggctaccccaccgtcgtcgccgaagaaaacatgggcaaggccctgaccaaggaaagcaacggcgaactgaccttcaagtacttccccggcggtgtgctgggctccgagaaagaagtggtcgaacaggcccaggtcggcgcggtccagatgacccgtgtcagcctcggtatcgtcggcccggtggtgccggacgtgaatgtgttcaacctgccgttcgtgttccgtgaccaggcgcacatgcgcaaggtcatcgacggcgagatcggcgatgagatcctcgccaagatcaccgattcggaattcggcctagtggccctggcctggatggacggcggaacgcgcaacctctacaccaagaaaccggtgcgcaagatcgaagacctcaagggcatgaagatccgcgtgcaaggcaacccattgttcatcgaagccttcaatgaaatgggggccaacggcattgccatggacaccggcgagatcttcagcgccctgcagaccggggtgatcgacggtgcggaaaacaacccgccgaccctgctcgaacacaaccacttccagaacgccaagtactacaccctcaccgaacacctgatcctgcccgagcccatcgtgatgtcgaaaatcacctggaacaagctcactcccgcccagcaggacatggtgaagaaagccgccaaggccgcccaggcggacgagcgcgtgctgtgggacgccaagtccgccagcagcgaaaccaagctcaaggccgccggcgtggagttcatcaccgtcgacaaaaagcccttctatgacgccaccgcgccggttcgcgccaaatatggcgcggcttacgccgacatcatcaagcgtatcgacgccgtccagtaacgccctccttctctagcaaggcccggcgcggtcggtatcgacgcgcccggttacggtgaacgccatgaagaatttactgctgcgcatcaacgaccgcctatacatgacctgcatctgggtcgccggcctctcggtactgggggtcgcgctgatcatcccctggggcatcttcgctcgctacgtcctcggcaccggcgccagttggccggagcccaccgccatcctgctgatgctgatcttcacctttatcggcgccgccgccagctaccgcgcgggtgcgcatatgtcggtggcggtagtgactgaccgcctgccgccacgccaacgccacatcgccgctatcgtcgcgcaactgctgatggccaccatctgcctgttcatgaccgtgtggggcaccaagttgtgcctgtccacctggaaccagttcatgagtgccatccccacactgcgcgtaggcatcacctatatgccgatcccgatcggtgggctgctgacgctcgtattcgtactggaaaaactcctgctcggcgaccagagccagcggcgcgtggtgcggttcgacctggtggaagaaaacgaaggggctgcctgacatggatgcattgattctgttgggcagttttatcgccttgatcctgctgggcatgccagtggcctatgccctggggatgtcggcactgatcggcgcgtggtggatcgacatcccgttccaggccttgatgatccaggtggccgggggcgtgaacaagttttcgctgatggcgattccgttctttgtactggccggggcgatcatggccgagggcggcatgtcacgtcgcctggtggcgtttgccggggtattggtgggttttgtgcgcggcggtttgtccctcgtcaacatcatggcctcgacgtttttcggcgccatctccggttcgtcggtggccgataccgcctcggtcggctcggtgctgatcccggaaatggaacgccgtgggtatccacgggaatttgccaccgccgtgaccgtcagcggttcggtgcaggcgttgctgacgccgcccagccataactcagtgctctactccctggccgccggcggcacggtgtccatcgcctcgctgttcatggccggcgtggtgccgggcctgttgatgagcgcctgcctgatggtgctgtgcctgatcttcgcgaaaaagcgtaactaccccaagggcgaagtcatccccttgaagcaggcgctgaagatcgccgcagatgccctgtggggcctgatggccatggtgatcatcctcggcggcatcctctcgggcatcttcaccgccaccgaatcggccgcgattgccgtgctgtgggcgttcttcgtgaccatgttcatctaccgcgactacaaatggcgcgagctgcccaagctgatgcaccgcacggtgcgcaccatttccatcgtgatgatcctgatcgccttcgccgccagcttcggctacatcatgaccctgatgcagatcccggcgaaaatcaccacggcgttcctgaccctgtcggacaaccgctacgtgatcctgatgtgcatcaatgtcatgctgctgttgctcggcacggtgatggacatggcgccgctgatcctgatcctcacgccgatcctgctgccggtggtgctcgggctcggtgtcgacccggtgcacttcggcatgatcatgctggtcaacctcggcatcggcctgatcaccccgccggtgggcgcggtgctgttcgtgggcgccgcggtgggcaaggtgagcattgaaaaaaccgtgaaggcactgctgccgttctatgcggtgctgttcctgatcctgatggcggtgacctacattccggcgctgtcattgtggctgccgagcgtggtgctgtgatgctgatcgaactggaagacaacctgacccacctcaccctggccccggccgtgggtggcagcatcgtcaattggcgcgtgcgagccagcggccagccattgttgcgccacagcgaccaacaggccctggacacgggcctgccgggcaaactcggctgttatccgctggcgccctggtccaaccggatcgccgaagggggtttcgataaccccgacggctggctggccctcacgccgaacagcctgaccgacccactgcccattcacgggtcggcctggcaacaagcgtggcaggtggtcagccagtcggcggacgaagtggtgctgcaactggtgtgcgacacaccgttcgcctatcgcgctgagcagcggttttgcttgcgcgacggcgagctgagcatcacgttgcgggtgactcatctggcggacaaaccggcgtggcacggcttgggattgcatccctacctgccgcgcacagcgcaaacgcggttgcaggccaaggcctcgcaggtgtggatgagtgccccgtcgaaactgcccacggagctggcaccggtacccgccgcctgggatttccagacgttgaagaccttgccggaaggcctggtggacaacggtttttgtcagtgggatggacattgcctgatcgagcaaccggagctgggctatgccctggagtgccaggccaccggcgccgactacttcctgctgtactgcccgccggggctggggttcttttgcatcgaaccggtgagccatccggtgaatgcccatcacctggcggggcggccgggcctgaaactgctggaacacaagcagtcggtacaactcaatttcaagctgaaatacatacaacatgtgggagggggcttgcccccgatggctgagtgtcaggcaacagatgtttgactgataaaccgctatcgggggcaagccccctcccacagttttgatttgcgttgtgtcagggtggagcgtttttcaggcgcccggcagtgtcgatactgacgaccaccgacaaccccggccgcaatcgctcgctctcggcctggttcgggtccaccgtaatccgcaccggcacgcgctgggcgatcttcacgaagttgccggtggcgttatccgcctgcaacaggctgaactccgaaccggtggccggggaaatatgctgcaccgtgccgtggaatttgcggtggttcaaggcatccaccgtaaaggtcaccggctggccgacctgcacgttgtccatctgggtttccttcatgttggcaatcacccacagctgcggcggcaccagcgccatcagttgcgcgccggagttgacgtaggcacccaggcgcacgccaatctgccccaactgaccgtcacgcggcgcagtgatgcgggtgttggacaggtcgatacgtgccagctccaccgccgcctcggcactcgctacggcggcttccagggagccacggttgacgatcaccgtctgcaggtcctgccgcgcgatttccaggctggcctgggcttgcgccacggcggcgatggtctgcgcattggcggcgcgggtcacgtccagctcgcgtttggacaccgagccgtcgctgatcagttcttcattgcggcgcaaatcggccgtgcttttgcgcgcctgtgcctggctgtccaccaaggctgcctggcgcaacttgatggtcgcttcggcgctgttgcgctgctgcaccacattggccagcgaggccttctgcaccgccagttgcgccagcgcctggtccaggcgctgtttgtagatgcggtcgtcgaggcgcaccagcaggtcgccggccttcacgtattggaaatcctgaaccggcacttcaaacacatagccgctcagttgcgggccgatgatcgtgacctgcccacgcaccagggcgttctcggtggtttccacggtgctgctgaacggcggcaattgccaggcatacagcacgatcagcacgccgacgatggcaatcgcggcaaagcccagcgatgagacgatgcgcacccgcagggagcggggctcggtgaccgaggcgccgggcggcgtggtgccttccggggtggcggcgatggcgttggtggtcgtggtggtggaagtcggttcggtcatgaagaagcgccgctgggttgaacgggaggggctgctgttttggtcgtgctcatcagccacaggctgcggataaagatccagatcatggtcagtatcgcgatgatcgcgatcagcatgaagacatcgttgtaggccatcacgttcgcctcacgggtcgccgccgtagccaggctgcgaatgcccatgaggttgcgcaactcggggtcggcgacaatgccgccgtaggccgagccgccgctttgcacccgcgcggccacacgcgggtcgagcagggtcaggtgctcgacgatcatgctggagtgatatttctcgcgcacgatctggaacgtgcccagcaacgccgcgccaatcaggccgccgaggttctggcagataccgaacatcaccgagaaactcaccaggttgcgcgggttggtcagcacgttcttcgtgcccaataccatggtcggtcccaggaagaacgtaccgccgaagcctagcaggaactggctgatatacaggttctgcggccgggtcaggttgctggaaaaactgtccatcaccgacccggtggccatcagtgccagggaaatcaccagcggcatcaacaggtgcgccgggttgatggtcaacgcactcaccgccagcccggcaatcgcccctgcgagcatcaccacatacagggtgtgcatctgctggtagctcatgttcaacatctgcatgaaacccacggcgccggtggactgctcggacaacaccatgcggatcaggatcaccgccagcgccaggcggatcatcacgccgctgcccagccagcgggtcatcagcatcgggttggcgcggttatgctcgatggccagcccggccatgatcagcaccagggaacaggccgaggcgatgccgatccacggtgcttccagccaccagtcgatgcgacccagggacagcacggcgcagagcaaggcgacaccggtggcaaggatggcgaaggtgacgaagtcgagtttttcaaaggtcttgaagcggtcgccgggcggcaacttgagcaagaacacgcagcccaggcagatcagcgccaggcccagctcgaacagatacagcccgcgccattcggcgatttgcagcaggtcttcggagaacagccgtgccaatggcaaggccaactgcgccgtgcccaaccccagcaccagggacttcaagcgccacttggccgggaaggcctggatcatgtagtacaaacccagcgaactcagcgccgcgcccaccatgccatgggccgcccgcaccgcgatggccgagctgaggtcgttgacgaacaagtggccgaaagtcaccagtgcgtacagcaccaggaacacctcggtaaatgcacgcagcccgaactgctggcggaacttcaccagcagcaggttcatgcacacattggtcatcacataggcggcgggcagccaggccatttcggcggtggtcgcgcccagtgcaccttgcaggtattgcaggttggcgatgaccagcgcgtttcccaacccgccagtaatcgccaccagcacgcccaccatcgcgaacagccaacgcttgtgcgtcgggtgcagcggcgtagacggcgaaccgggcaggctcgggcgctcgtggggctcccaggtgtggggggtgtatttgttcattcgatgactcaggtaaacccatactcagagacagtaaacctgagcggagttcatcttgccatgtcgagggcataattgatgcgaagaacaggcatcacctgaaatgtgcgagggcaagtcgactcgtcgccctgcccccctgggatgtcctgcgtattcagatccagccgagccaactccagtaggtcgcagcgaataccagcatcaacaggtagccaaccagcgtcaccagaacccccaccttggcgaactgccgcgccgtgaacgttccggtccccaggcacaccatgttctgcggcgcattgatcggcaggataaacccgtagctcatcacaaaccccaagagcatggtcatgcccaaccggctgaaatcccccggcaaggtctgcaacaccgcgatcaggatcggcagcaacgccgaggtcaacgcggtggcgctggcgaagcccagatggatcaggatcaggaacgcaccaagaatcgcaaacacacccagcggccccacctggtcaagcccggtatgcgccaccacttgcgcgcccagccattgcccggcctgggtggtcagcagcgccgttcccaggctgatgcctaccccgaacacgatcaccgttccccacggaatgcgcgactgcacatccttccaggtcatcacgccgatacccggcaataacaggaacaccaggccggcgtaggtggtcgaggtggtgtcgaaactgtgcaggcgcccttccgtggcccaggccagtagcagcaacaccgaaacgctcaacaggcgcttctgcgcgccggtcatcggccctatctccaccagcgactgcgccaccgcctctttaccgccggggatgctgtcggtctccggcggcagcaacttgagcacgaggaacagcaacaccgccgacatgatcaacgcccacggcgcgccggcaatcagccagtcgatccacgacacgcgctggccaagcatcttgtccatgaaaccgacggtgagcaggttctgcgcggcggcggtctggatgccgacgttccagatgctggtgccctgggccaccacgatcatgatgccggcggcgatattcgagcgtttgtccacgccgaacgcggcgatcacacccatcatgatcggcaccacgcaggcactgcgcgccgtggcgctgggcaccacgaggctgagcagcaccgtcaccgcaatcgcccccagcaggatgcgccgggtgctggtgccgacccggctcagggtcaccaaggcgatacgccggtccaggccggtgtgggtcatggctgctgcgataaacagcgccccggccaccagcgccagcgccgggttggaaaacccggtgagcgccatgctgatcgccgggctggtgccgatcacatgcgcggggtcctgcaacgacggcgcggtgcccagcagaaaggccatcagcgacgtgatcatgatcgcactggcttcataggacaccgcttcggtgatccacaccaccacggcaaacgcgaggatcgccagcatgcggtgcccggcgaccggcaagtcggcgggcaccggcaacagcagcaccccggccatcaccaacacggcgacgaccaggcccaggggtaatttgaaagatgccgcactcatgggccactccaaggctctagatcaggccttgagcatgggctaaaagcacctgcgacgtgttgacctaggccaacaactggctcaacacggcccgcaacttgccgggtttgaccggcttgttcagcaacggcgcttccaaccggcgcaacgccctgcggcactggtcggtgcggtcggcggtaatgatcacggccgggatgttcagttcgaaatgctcacgcaggtgcttgaccaccgcacaccccaccaccccatggtcgaggtgataatcggccaggatcagttccggcgccctgccctccaacgccagcaacgctccggcctggtcggtggcggtgaccacatcacagccccattgcccgagtagcgcgcgcatgctgtcgaggatgctcacctcgttgtcgatcaccagcagacgccgtcccggcagcgggttgccggtggtcggctgggctggcaactggctgatcggcagagggatctcggtgctcaacggcacctcgatactgaacatcgagccacgtcccggccacgagcgtacggcgatggggtaacccaggatctcggcgatccgctcgacaatcgccagccccagcccaacgcctttacggtccgctgcgcggccgacgtcgagctggttgaactcgaggaagatcgcctccagccggtcctgcgcaatcccgcgcccggtgtcccagacctccaggcgcaggcaatcgccacgcttgcgcgcgcccaacaggatgcaaccttcgtcggtatagcggcaggcattgctgaggaagttacgcaaaatccgcgtcagcaagcgcaagtcggtgctgatcgcatagcagcccgtgtgcacccgcaggttcaaccccgccgcctgggccaccgactggaactccgagaccagcggcgcgaacagttcgtcgaggcggtacagcgccacatccggcttgaccgccgcctggtcgagccgcgagatgtccagcaagtcggtgagcaagtcctcggcgccctccagcgcctgatgcgtgcgctccaccagcacctgctcgacgctgggcaactgccgttcgcgcaaggtggcaatcaacaagcgtgcggcgttcaacggttgcaacaggtcgtggctggcggcggcgaggtatttgtccttgctgcggttggcggcctgggcggcgtcgcgggcgtcgcgcaggtcctgttcgatctgctcgcgctgggcgatctgctgttgcaggttgtggttggcttccagcagttcatcggtgcgtgcggcgacccgctgctccaactcgtcattgagacggatatagcgcttgcgctcagcctccagctcatccagccgcgccgtgagttccgggtaatggctcttgcgcgccgactggtcgcccagccccagcaacccggcgagtgcgcgttgctggtcgtcagagagcttcgccatagacgacctcgacgtcacgctggctcgactccctcgggttggtgaggatgcacggatcgcccatcgcatgctgggacaggaacggaatatccgccacgcgcacgccatgcaggcccagggtttcgtggaagccgatcgcccgcttgagcgcgatcaaatgctccaccagccgcgcgcagatctgccggtgattgaggccgcgacagtcgatgccaaacgtctcggcaatcaccttgaaacgctccggcgccgagctgtagttgaacgccaccacatgctccaccagcaccgcgttgcacagcccatggggcaggtcgaggaagccgccgaggctgtgggacatggcgtgcaccgcgccgaggatcgcgttggagaacgccagaccggcctgcatgctgccgagcatgatcttctcgcgcagggcgatgtccgtagggttggcgatcatctgcaccaggttgccgttgatcaggcgcattgcctccagcgcatgggggtcggtgagtgggccgtggccggtggaaacgaacgcctcgatcgcatgcaccaacgcatcgatgccggtgcaggcagacaggaacgggtccatgctggcggtggtttccgggtcgatcagcgacacatccggcaccaccgccttgctgacgatggagaacttcatgcgttcctgctggttggaaatgatcacgaactgcgagacatccgccgaggtgccggcggtggtgggaatcaggatcagcggcgggctgggcacgcgaatggtgtcgacgccttcgaactcaaggatgctgcgcccgtgggccaccacaatgccgatggccttgccgcagtccatggggctgccgccgccgatggcgacgatcacatcacagtgatgttcacggtacacctcggcgccggtcattacctcttcgacacgcgggttgggcgagacggcgctgtacaggcagtagtcgatgccgagggcttgcaggctggcttccacatcggccacccaaccggcggcgatcacgccggggtcgctgaccaccagcaccttgcgcgcgccgaaggtcttggcgtagttaccgacgttgtgccggcaaccggctccaaagatgatttcaggcgagacgaatttacgcaggaggctcagatttgggctcattggaaagcctgtttttattattttggaagaatgcgctcaacactaaccgatccggctgcgaatgcaatcagaccaaagaggcatccttccgacagtacccgcgatcaacggctagcgaagtacatggtcacttcgaagccgatacgcaggtcggtaaatgcaggtttggtccacatgggggcagtcctcgggttgggccggaagattccggtggggtcattaatgcatggggggatggggtagcgaatgctactttcgaagtattaagcgcactgcattagtcgcgaatgtgcagagaccaaaatgtgggagggggcttgcccccgatggcagtgtgtcagtcaatatgtaggtcactggcataccgctatcgggggcaagccccctcccacattggacagcatttcaagtcaggtctagaagaaacccagcgggttgatgtcgtagctcaccagcaggttcttggtctgttggtaatgatccaacatcatcttgtggttctcacgcccgacgcccgattttttgtacccgccaaacgccgcatgcgccgggtacaggtgataacagttggtccacacgcgaccggccttgatcgcccggcccatgcggtaggcgcggttgatgtcgcgggtccacaggccggcgcccaggccgaactcgctgtcattggcaatcgccaacgcttcggcttcgtccttgaaggtggtcacgcccaccaccggcccgaagatttcctcctggaacacacgcatcttgttgtggcccttgagcagggtcggctggatgtaatagccgctggacaggtcgccttcaaggcgctcggctgcgccgccggtgagcagcaccgcgccctcctcctgggcgatcttcaggtaggagaggatcttgtcgtattgctgctccgaggcctgggcgccgaccatggtctcggtgtccagcgggttgccgcgcttgatcttgacgatcttttttatcacttcggccatgaacggttcgtagatcgactcctgcaccaaagcccgcgacgggcaggtgcacacttcgccctggttgaagaacgccagcaccaggccttcggcggctttctcgatgaattgcggttcggcctgcatgatgtcttcgaagaagatgttcggcgacttgccgcccagctccacggtggacggaatgatgttctcggccgccgcatgcatgatgtgcgcgcccaccggggtggaaccggtaaaggcgatcttggcgatgcgcttgctggtggccagcgcctccccggcttcgcgaccaaagccctgcacgatgttcagcacgccgggcggcagcaggtcgccgatcagctcggcaaacaccatgatcgacagcggcgtctgctcggccggcttgagcacgacacagttaccggcggcgagtgccggcgcgagtttccacgcggccatcagcaatgggaagttccacgggatgatttgcccgaccacgcccaatggttcgtgaaaatgataagccgctgtgtgctcgttgatctcggcggcgccgccttcctgggcacggatacacccggcgaagtagcggaaatggtcggcggccaggggcacgtcggcgttgagggtttcgcgcacggccttgccgttgtcccaggtctcggccacggccagcacttcgaggtgttgctcgatacggtcggcgattttcagcagcaccagggcgcggtcctgggccgaggtcttgccccaggcatcggcggcggcgtgggcggcgtcgagggccttgtcgatatcggcggcgctggagcgcgggaactcggcgatgacgtcaccggtgaccggcgaggtgttggtgaagtactcaccgttgatcggcgcgacgaactcaccgccgatgtaattgccgtagcgcggcttgaagctgacgatggcgccgggggtgccaggttgggcgtagatcatggtgaggcctctgcttattgttgggtgttgatgggctgcatctgggtgcgttcgtagtgcgggtacaggtgggtcacgctgcgggtcagttcatagcggctctggttgatgcccgcgaatcgctcggggatcgggctgcggatcagctctggcatgtcgctgccatgggctgccccgtcgcgtagcaattgatcgagccaggtgaggtagtcacgcatctgttcgaagggtttggcgtcggtcgcaatggggccgtggccgggcacgatcagggtccagggcaagccttgcagggtggcgatgtccgccagccagatcgccagccccggtgaatggggcgtggtaagcgcacgttggtagaacaccaggtcgccggcaaacagcacgccggtcttgcggtcgaggatcgccaggtcggcgccggtgtgcccgcgcagttgcagcagttgcaggtcgtggctgccgaagtttttcacaccgggctgcagcgtttcgccgggcagtaccacttcggtgccgcgcatccagtcgccgaccatgcggtacaggttctcggccatgctgtcgccctgctcatgcagcaaatcctgggtaccggccagggcgccaatcggcacgtccttgaaggcttggttacccagcgcatggtcgggatggtggtgcgtcagcagcacctggatcaccggtttgtcggtgatgcgggcgatggcctggcgcagggcttcgccgtagcgcctggacggtccggtgtcgatcaccaccacgccgggctcggtgacgatgaacccgacattgacgatattgccgccgttgtccttggcgaaattgtcggtgctgccttccagcagccaggtgttgtcggcgatcaaacggggcttgagggcgtaatccagatccgccagcactggcaggctgaacagcagcagccacagcagaatccagcgcaggttcatgggatggccgcctcgaactggctaccgctggtgtcgcgcagggtcaggcgcgtggggccgccgccttcgatgtcgaaagccaggctggggttttcgctgaccgccgggaacagttccaggcgtgccagcagttggttatctgcgccgcgcagctcggcctggttgatgaagaattcggggatgccgctgaccatgccgttatccatcggatgggcgacttgcagtttcacgcggctgaactcggcgcgtgggtaacggccgccgagcacttcgcccaggtgttcttcccaacccggttgcgtgcgcaccacgctgggcgccgtgcagccaccgccagcagcatcgatcaaggccgagccgacatgccacatgccatctttggtgagcactgctgcacgcagcggcgtggcctgttcgatacgaatccgcagcgacagccacggcagcaccagcccctgcggctggaaatcgacgatctgcggcagcgggttcagctccgcccaggcgaggatcttgactacgtcgcccttgaacgcccgcgcatcgatctccagcggcacctggcgcgcatcctcggcgaacggcggcgccaagagcctcacgcgctcatcgaacacaaacgctgcattgtcgagaaagcgctggtgatagtaggcccacatcaccgagggcaccgggtccacgggcgcgccccaggccagcatcggcacacagcacaaccaccacccgcgcaggcccatggcttactcctcgacgtgcacgctgtcgaggtaggtacgcaccgcccacagggcttcctggctgaggtagtcggccattttcggcatgtacacccggccatcgcgcacggcgccgtggcgcacgcgctccacaaaccattcatcgccggcgtcgccggcatcgagcatgcgcaggtcgggagcgatgccaccggacttggcttccaggccatggcacgccgcgcagttctggttgtaggccgacgcaccgacctccaccgccttgtcatgctcgggtgtggtgcgataggggttggtggcggcccagccatcggcgtccagcggtacgccggcgtccttgatcggggtgaggcctttggtttccacggcggtgggcgtcacgttgccgtgggcccaggcggaacctgtactgattgcaccggcgagcaggcaggcggtcatcaaggcgttgcgttttgttgtcattatttttccctcgggagtgcacgcaaaacctcttggcagaggctatggcaaccatcttaggaagcacccggcaggacccgtatgctgctttggtgggcgggttctcatccgttggtagcaggccttgtggggcactgctaaatcagaggcggttcgggaaattgtcccggcaacaccgggactttttccgtattcgccacggcgttcacatcgcaccctgtgcaggccaaaacctccactgggaactgcaaccatgacaataagatcgctacccgccctctcgccgctgagccttgccgtgcaggccttcctgctggttggcagcctgtccttgagtgcggccagcttcgccgccgccgagcctgccaaacagacccgcaacgtcacctgggaagacatcgccaacgaccacctgaccacccaggacgtgctgcaatacggcatgggcaccaacgcccagcgctggagcccgctggcgcaggtcaacgacaagaacgtgttcaagctcacgccggcctggtcctattcgttcggcgatgagaagcagcgcggccaggaatcccaggccatcgtcagcgacggcgtggtatacgtcaccggctcctattcccgggtgttcgcccttgatgcgaagaccggcaaacgcctgtggacctacaaccaccgcctgcccgacaacattcgcccgtgctgcgacgtggtcaaccgcggcgcggctatcttcggcgacaagatctacttcggcaccctcgacgcgcgcctgatcgccctcgacaagaacaccggcaaagtggtgtggaacaagaaattcggcgaccacgccgccggctacaccatgaccggcgccccggtgctgatcaaagacaaggtgaccggcaaggtgctgctgatccacggcagctccggcgatgaattcggcgtggttggccagctgtatgcgcgcgacccggacaccggcgaagaggtgtggatgcgcccgttcgtggaaggccacatgggccgcctgaacggcaaggacagcaccccgaccggcgacgtcaaggcgccttcgtggccggatgacccgaccaccgaaaccggcaaagtcgaggcctggagccacggcggcggcgcgccttggcagagtgcgagcttcgatgccgagaccaacaccatcatcgttggcgccggcaaccccggcccgtggaacacctgggcgcgtacctccaaggacggcaacccccacgacttcgacagcctctacacctccggccaggtcggcgtcgacccaagcaccggcgaggtgaagtggttctaccagcacacgccgaacgatgcctgggacttctccggcaacaacgaactggtgctgttcgactacaaggacaaggatggcaaggtcatcaaggccaccggccacgccgaccgcaacggcttcttctatgtggtcgaccgcaacaacggcaagctgcagaacgccttcccgttcgtcgacaacatcacctgggccagccacatcgacctgaagaccggccgccccgtggaaaacgaaggccagcgtccagccaagccattgccgggcgaaaccaagggcaagccggtggaagtctcgccgccgttcctgggtggcaagaactggaacccaatggcctacagccaggacaccgggctgttctacatcccgggcaaccagtggaaagaggagtactggaccgaagaggtcaactacaagaagggctcggcgtacctgggcatgggctttcgcatcaagcgtatgtatgacgaccacgtcggtaccctgcgggcgatgaacccgaccaccggcaaggtggtgtgggagcacaaggaacacctgccgttgtgggccggcgtactggcgaccaagggcaacctggtgttcaccggcaccggcgatggcttcttcaaggccttcgacgcgaagaccggcaaggagctgtggaaattccagaccggcagcggcatcgtctcgccgccgatcacctgggaacaggatggcgagcagtatatcggcgtgacagtcggctacggcggcgcggtgccgttgtggggcggcgacatggcggagctgaccaagccggtggcacagggtgggtcgttctgggtgttcaagatcccgagctgggacctgaaaaccgctcagaagtaacctcaccctatatgccggggtcatcctttgtggcgagcgggcttgtcccgcgttgggctgcgaagcggcccccggcttttctccagccccaacgagccgtcaggttttggggctgctgcgcagcccaacgcggggcaagcccgctcaccacagcaagcccgctcaccccaggatccccagaggtctcgcgatgaaatatctgccctttttaatcctgctatccctgcccttggctcacgccgacgagggcgacgacgcccccctggtcatcaacggctgtaccattgccgaacacagccaatgccccggcgcccacctcaagggcgccaacctgagcaatcaagacttaagcaaaatgaacctggccggcgccgacctgcgcgacgcagacctgcgccacgccaacctcgacctggccaacctggaaaaagcccagttgcaaggcgccaacctgacccgcgccagcctgcaacaagccaacatgcgcctggcggatttcaccggtgccacgctgatggccgtgcaaggctgggggctgtttgcccagggcgcacaatttgaaaacgccaacctcagcgccgcctacctgcaatttgcccggttgtcgggggcgaagctgcaccaggccaacctgcgggcggccgacctggaaatgacctggctgagcaaggccgacctacaaggcgccgacctcagcgacgccaacctgcaagaagccaagttcggcgaaagcaacctggagaaagccaccctcaccggcagccgccagcactatgcgaatttccaggatgcgaacatggaaggttgcaaggactgcccgaccacctgggaccgttaacccgccacccgcaccacccccatgtcgatacccaaatgcaccaactcggcatgggaactcacctgcaacttactcttgagcaaggtcaggtgattggacacggtcttgctgctgatactcaactgagcggcaatcgcgcgcgccggggtgcccttggcgagcatcaggaaaatctccagctcacgctgggtcatgctttgcaggcgccggtcggtggggtggtacgccagctgggtggccaggtcctgttcgatataggtgtggccgtcaagaatgcgctccaccgcatccagcatcaccgccggcaacgcgcttttggtcaggtagccggacgcaccggcctccaacgcctggcgcaccaagggcaactcagcatgctggctgaaaaacagcacgcgcaattgcggcaagcgctggcgcaggcggcgggtggtttccaggccgctgatccccggcaggccgaagccgatgatcaccaggtttggcaccgcttcgtgcacccgcgccaaggcatcctcgccactcgccgcttcgcgcaccaccacaccgggcagcccgctgcgcaatagcccggcgtaacccaggcggaccacggcgtgatcatcgaccagcaggatattcatagtgcctccaatggcggtgcctctggccatgctagaaccccggggaccaatgggacctactactttggtactggttttgctgtctatcgtcgcattcccaaggcagcaggactggcgtgtaatgggcgcataacgataaggattggatccgccatgctgcccgctcgactgccccttgcggcactgttgtgcctgttcatcacgtacgtacaggccgacacgccactgttttccgccgatggctaccgcaccagcctgtaccgcagccccacgcccgaacacctgcctggggcgatcatcgtcgacaccccagccctgcaaaccctgttgacccagacgcccgcaccggtactgatcgacgtgtaccgccgcccgtggctacagggccgcttcatcgaagaccagccccacgccaacctgcccggcagtcactggctggccaataccggcgacggcgacctcacgcccgagtggcaaggttactttgtgcgccacctgtacaagtacacgggcggcaacctggcccgcccgctggtgttctactgccgcgccgattgctggctgagttggaacgcggtaaaacgggccgccaacctgggctataccactgtgtattggtaccgcgatggtttggatgcatgggaagcggcagacctgccagtaatggctgcgacacccgaaccctttgaataaaaaaccacaacaagaaggtgaacggccatgtacaaaattctgattgccgacgatcacccgctgtttcgcgaggcgatccacaacgttatcagcgacggtttccccggcagcgacgtgatggagaccgccgacctggacagcgcccttgcgctgacccaggaacatgacgacctcgacctgatcctgctggacctgaacatgcccggcatgcacggcctcaacggcctgatcaacctgcgcaacgagtcgccgaccattccggtggtgatcgtctcggccgagcaggacaaacagatcgtgctgcaagctatcacctacggcgcggtgggctttatcaccaagtcatcaccgcgcctgcaaatgaccgaggcgatccagcagattctcaacggcaatgtgtacctgccgccggacatcatccgcacccagaaaaacactgggcagcggcgcatgaacgacagccctgggtttgcccccgagctgttgcaggcgctgacacgcaagcagctgctggtgttggagcggatgaccaagggtgagtcgaacaagcagatcgcctatacgctggagattgccgagaccacggtgaaggcccatgtgtcggcgattttgcgcaagttgaatgtgcataaccgcgtgcaggcgatactcagtgccggagatatcgatttcggctcgtacctgcgccgctgacggtctgacacaccacaaatcaactgtgggaggggcggtgcgacgactcgacttgcccccgatggcagagtgtcagtcggcacatgcattgactgatccaccgctatcgggggcaagccccctcccacagttgatctgcatttggtcaggtccggctgagcaggtggctcatggcggttttcagcttcatgggcctgacgggcttgtgcatcaaggtatgccccaactcacgnnnnnnnnnnnnnnnnnnnnnnnnnnnnnnnnnnnnnnnnnnnnnnnnnnnnnnnnnnnnnnnnnnnnnnnnnnnnnnnnnnnnnnnnnnnnnnnnnnnnnnnnnnnnnnnnnnnnnnnnnnnnnnnnnnnnnnnnnnnnnnnnnnnnnnnnnnnnnnnnnnnnnnnnnnnnnnnnnnnnnnnnnnnnnnnnnnnnnnnnnnnnnnnnnnnnnnnnnnnnnnnnnnnnnnnnnnnnnnnnnnnnnnnnnnnnnnnnnnnnnnnnnnnnnnnnnnnnnnnnnnnnnnnnnnnnnnnnnnnnnnnnnnnnnnnnnnnnnnnnnnnnnnnnnnnnnnnnnnnnnnnnnnnnnnnnnnnnnnnnnnnnnnnnnnnnnnccggctgagcaggtggctcatggcggttttcagcttcatgggcctgacgggcttgtgcatcaaggtatgccccaactcacggatctgctgcttcaattcattgctgtagttggcggtgatcatcaacgccggcaccgcgctcccgcgccgggcgttaatgcgggccacggcgtccacgccgttctggtcgtcgtccagatggtaatcggcaatcaacaggtccgcctcggcatggtagttgtccacctgccgcgccaggtcctgttccgacagcgccgtgatcacccggcagccccagccttcgagcaaggtacgcatacccgcgcagatcgccgcgtcgttatccagcacccacacccgggcaccttgcaggcgctcgagcaacggctcgctcatggaaggcgccggcagcgacttgggggccgtggcgctcaacggtacctccaccgagaacatcgagcctttgcccggccaggatctgacgctgatgcgatggccgagtatcccggcgatcttttccacgatggccaggcccaggcccaggccgcggtcctggtccggtcgctgcacgtcgccgcgcttgaactcctggaaaatttcctccaagcgctcttgcgcaatccccatgccgctgtcccacacctggatcaacaggcgctgctgctgacgccggcaacccagcaccacccgcccctggtaggtgtagcgaatggcattgctgagcaggttgcgcaggatccgcgccagcaactggatgtcgctgcgcaccaacgcggagcagccgacaaagtgcagcgccaagccttcggcgcgggccagttgggtgtactcggcggcgaggttgtcgagcaattcactcaaggcgaacggcgcgatatcggccttgatcacgccagcatccagtttggaaatatccaccagggtccccagcaggttttccacgtcttccagggagttgctcacattgcgcaccagggcttcgctggggcgttccagcaaggcactggtgaacagccgcgccgcattcaacggttgcaacaggtcatggctgacggcggcgagaaacttggttttcgacaggttggcctgctcggcctcgagcttggcttcgcgcaggcgggtttccatgcgccggcgctcgtcgatttccttgagcagttggtcattgagcgacgtaagctccgaggtgcgctgggccacgcgctgttccagatgctggtaggcctggtgcaaggcttcggccgtgcggcggcgttcggtgatatcgcggatcaacacgaagatccccaccacctcgccactggccagcatgttcggtacataggagcgcagcatgtagcgttcctggtggttgatgttggtttcggcgaactcaaaggtcacgctctcccccgccaaggcacgggcgacgtaggcatccaggcgctggcaatgctgctcgctgtgcacttcgcgcaggctctgcccaagcatcatgccgcgcggccagcagtaccattcttcatagaccttgttggtgaactcatagaccaggtcggcattcaagtagccgatcagcgccggcacgttgtcggtgatcaggcggatccagcgctcgctctcctgggctttctgcgccgccgcctgttcgccacgcagggtttcggcgcgcagccgggcgttgatcagcaggtggttgctggccttgagttcggccatcgcctggttcagcgcgtcggtgcgctcgcgcacttgctcggccagcaccaccgaatgctggaaggtggtgtaggggttgttgccctggggcatgccggactcgatgcgctcgatcagcgccgcattgatccgcgccagcttgtggttgtcctgttgcagccgggccagttgagcgggcaggtcagcgccggcctcgggcaatggcgaccccggtgaaggtctggttgatgtgcatgccattgaactgttctccgtaggtattgaaacccatcacccgctggtcccgcaagtaaccgccgagctgttcgagggtgccgttgtcctccagctccaggcggcgcaaaaagcaatcgcagccgatggtcagcaacaggtcgccgaggcgcgcttgcaggccgtcgaacagagcctgcaggttcggcagcagcgggccgggcgtcatcaccgtcagcacgatgccgttttccaccgcgcagtagaaactcaggctgaggtcctcatgcacctgctggatagcgcgcacgtagtactggtcgtggatacgcaccgccagcgggtgggcggcgaacgtgcggtggtcgaggtcggccaccgccacgccgatatgccgcgcgtactcttcggcggcgggctcggcgttgagctcgaacacgcggcgtgacgcgctgtcggcgccggtcaccaccagcttttccgtgcgcggcaggatatggtgggtggtgaacacctcgaaatccagccaggtgttgaccagcatcaccaccgccgcgccgctgtggaacacgccgttgaagtacacgtgggtgtgggtgaggaagttgtcgtcaccggccgaaccgccgaaatgcgggatatccccaagagccgcgctaagggcggcgaggaccatttcttcgcggctggacaggccgtcaagcagggtcagcgcaaacgtgttgcccttgatcggcgccagggtgttgctgcgacagccgccgaccagacgttcgaccatgtcctgggcaccgatcaggctgaagtgctcgacctgatcgatcagctccgtggcgatggaaaagtgcgcatggttgaagcccaccgccgtgatgcagttgcgaccgtagccttggggcgtgatctcgccggcgctggtgcagccgaccacacgcaccttgccgaagcactgttgcagggcctggccaagggcctggaggtcgtaggacgcggaacagaaaaacagcacaaaacccaggtacgggtgcagcagttgctgggccaattcctcggcggcctgcccagcatcggtggcctgggacatggcgctgactacgccttcactgttgtgcatcgttgcctccccctctgaagcatcagtgtacgaagggcctgggcgtggacctatgctacttgggtactgggtggggggattcgatgggatgggatgaggctttcaagaccactctctcaaaagccaatggagatccaatgtgggagggggcttgcccccgattgcagggtgtcagtcgatgcatgagtgattgatccaccgctatcgggggcaagccccctcccacattttgattgcatttcagatggctaccatgccattgccgtcgtccttggtcttgccgtaggacagggccaggcggttcttgccgaccttgtacgagccttgtaccaggtagccattgctgtcgacgttgcgcaacgtggcctccccggcattgttagtgaaaaacgggttgatgcccttggcctggaaccccgaaccggtcagcggcaaaccgcccatcttcgcctgcacgccgtagcccaggcccttggaggtgacggaggccacggtggaaaggcgttgatgtagccatcggtggagaaggtggtttcgtccttgtcgtacaacatgatttcggcgtcggcgaatgggctgaagcccaggccgaggataaaggcaggcaacagacgcagcggggacttgatgtcggaggcgattatcaaaaggcggtgggccatggcatacgctgccttggccctgatttgcggatgctttggaggggcagcgggtgcccggcaagttcggtttagtccaggcccggcacttaggatgtaagaccggccttgaccaacatgcccacggccaccacgacacacaggccggcaaaaccgacctgcaaggcacgcgcggggatcaccgaacacagacgccgaccggcgagcatgccgacgatactcgcggcgataaacacccaacccaccggctcgatgcgcacaccggcatgcagcgcgccggccacgccgatcaacgacagcaggctgatcaccatcagggaggtggcaacgatgccacgcatctgcacgtcggtgagctgcttgaacgctggcacgatcaggaagccgccgcccacacccagcaggccggacaccgcgccggtcaccgcgccgagggcggccagggtcgcgctgcatttggcggtccaggccaggcgcccggtctgctggtcgagcatgcagttcttctggccccaggaggcggtcccgtgatcactcggcccggcctcgcgtttttcgcgctgcaacatgcgccaggccaccagcaccatcaatgcactgaacagccccatcaacagggcttccggcaactggtgggcgaggtacacccccaccggcgaaaacagcgcgccgagcaaggcgatcagcaacgcggcgcgataacgcaccaggccatggcgcaaaccatcgaccgcccctaccgccgccgccgcgccgacggcgagcaacgacaccggcgcggcctgggtcatgctcaagcccaggcccagcaccagcgccggcaccccgaggatgccgccaccggcgccggtcaggcccatgaccaggcccatcaacaatcccaacacactggcgagcagcattcagtccaccttgctcaggcgggtcagccattcgcggcccttgagcatgccgttccagtagaaccacggcagcagagtcgccttgaggaaccacatcgagcgacgcgcctgggtcgggtccaggggaaaggtcggcagcagcttgccgccatagccgaactcggccagcaccaccttacccttctccaccgtcagcgggcaggagccgtagccgtcgtatttgagcggcaacggcgcctgtttgcgcagggccagcaggttctcggcaaccaccacgatttgcttgcgcaccgctgcggcggtcttggcgttggtggtgccgcacacgtcgcccaggccgaagatatgcgggtaacgcaggtgctgcaggctatgggggttcacttcgcaccagccggccgcgtcggccagtgggctttggcggatgaaatccggcgacacttggggtgggaccacgtgcaagaggtcgaaggctttctcttcgatgcggacgttgccctcggtgtccttcacttcgaaccaggccttgcgggctgggccgtcgactttcaccaggttggcattgaatgccaggcgggcgttgtacttttccacgtacttcatcagcggcggcacaaaggtcgccaccccgaacagcgcggcgccggccaggttgaattcgacgtcgatgtgtttcagcgtgccctgtttgagccagtgatcgcaggacaggtacatggctttttgcggcgcacccgcgcatttgatcggcatcgccggctgggtgaagatcgccttgccgcccttgagttgctgcaccaactgccaggtgtaagcagcgtgctggtaactgtagttggacgtgacgccatgtttgcccagggtgtcttgcagcccctcgaccttctcccaggccaggcgcaggccggggcagacgatcaggttgttccaggtgacgcgctggccgctgtcgagcaccagggtctgctcgtccggcagcagttcgctgacggcggcctgtacccaggtgacaccattgggcaacacgtcggccagtgggcggcgggtctttttcacgtcgtaggcaccgccgcccaccagggtccaggcgggctggtagcagtggtggtcgctcggttcgatcagggtgatatgcaggtgggggtcgcgcttgagcaggctggccagcaggccaatgcccgccgagccgccgccgatgactacgatatcgccactgatggtagggccccagtgttggtcggtcatggtctatcgcctttgtaatacatgcacacaagggtcgctgccggatggcgtcacgcccagctttttatgaccgcgccgcaatacaggccggacagggtcttcatcacttgaatcacttcatggctggccagcccgtagaaaatgtatttgccttcccgacgagtggccaccaacccctcgtcgcgcaggatgcccaactgttgtgacagcgtgggttggcgcacaccggtcagggcttccagctcgccgacattgcgctcgccctgggtcaactggcacaggatcagcaagcggtcctcattggccagggccttgagcaaggaacaggccttggacgccgatgcgcgcaactgggcaacttcgccttcactcagagtagattccatttgcctcgggtcctttgtgtcacttaagctcaaaacattatgtgaaaacgtaaactgattgtaaccacttttttcttcatcggggacgtccgccatgccagcgttgattcaagcctttctggacgaggcatcgtcgacctacacctacgtcgtctatgaaaccgacggcggcccgtgcgccattgtcgactcagtactcaactacgacccggcctcggggcgtaccgataccgcccaggccgataacgtgatcgcctttgtgcgcgagcacgctttgcaggtgcagtggctgctggaaacccacgcccacgccgaccacctgtccgccgcgccctacctgcgccgtaccctgggcggcaagatcgcgattggccagtccatcagtaaagtccagggcgtgttcaagcacctgttcaacctggagccggagttccgtgtggatggctcgcagttcgaccacctgtttgcaccgaatgaggtgtttcatatcggtaacctcaaggcccaggcactgcatgtgccagggcatacgccggcggacatggcctacctgatcgacggccgattgatcctggtgggcgacacgctgttcatgccggatgtcggtaccgcccgctgtgatttcccgggaggggatgcacggcagttgtatgcatcgatgcgcaagttgctggcctttccagtggaaaccgagttgtacgtgtgccatgactacccgcccgaaggtcgcgaggccaaatgccggaccaccgtggccgagcagcgcgcaggcaatatccatgtgcatgacggcgtggatgaagcggcgtttgtagaaatgcgcaccaagcgcgacgccgggctgggcatgccgacgctgttgctgccggcgatccaggtgaatgtgcgggcgggcaacctgccccccgccgaagataacggtgtggtgtacctgaagattccgctcaaccagctctgaatcgcgcttactcgaagtacgacgacttggagggcgcaagccccgaccacaattcgtcgatatgcttgaagccccactcctcggcgctttcacggctgatgatcttgtccggttgctcagccaggttcaccaccgactgggaaatcggcaagcgtgaacgtgccgaaaagaacaccttgaccttgggcgtcagcagcgacgtagggctttgttcgacaaccacgccaatgcgcccgctttccaggcgcaccaaggcgccgaccgggtaaatacccacgcaacggacaaacgcctggaacacccgggcatcgaagtgtcccttccattcggccattttctggatcgcctccgcgggcccccacccatgtttgtaggggcgctccgaggtgatcgcatcatagacatcgcataccgcgcccatttgcgcgaacaggctgatctggtcctgcgccaggccaaggggatagccgctgccgtcgactttttcatggtgatgcaggcacacatccagcaccagggcgctgatctgcgggcatagccgcaacatctgcgcgccttccaccggatgctgacgtacggtgcagaactccgtctcggtcagcccggccggcttgctcaagatctgctcgggaatggccattttcccaacatcatgaaacagcccggccaacccggcttcctggaccaactccggcgacaggttcaattgccgcgccagcgcgatcatcaagccactgaccgcgacagaatgcatgtaagtgtattcattagcctttttcaggcgcaccaggctgagcaaggcatggggatggcgcagcatagagcgggagatgtcctccaccaggctggccacttgacgaacctccaccgcgcgccccatgcgcaggtcactgaacatactgatcacggcacgcttggcaaccgcacacaccttcacggcacgcgccacctccgctttcatctctgagggggctggcaccacaggacgcggtgtggcaggttgtttgacggtgaccggcgccgctggggccggttgtggttcgtcgcagccttttgcggtatcgatccagacccgctggacctgcgacgtcaacaaacgctgccggtcctcttcacggtccaacaaaaagctgctcttccagaacccatggccgatccatggcccgtccagtttgtgcaggtacatccccaggatcacctgggaacaagcaatgcacttcagcatgtatcatcccccccaaggcatgacctgcttggcgatcaactcactgcaaacttcgccacgatctgtttcaagtccacggcgagcctggacagttcctggctggccaccgatgtctgaccggcggccgacgaactctggatggacaggtcgcggatgctgatcaggttctggtcgacggaacgcgccacctgcgcctgttcttccgacgcggttgcaatcatcaggttacgctcattgatgtcggtaatggcttgggtgatctgggtgatcgccacgccggcttcatgggcaaccttcaacgagtccaccgcttcattgcgattgaggaccatggaggccaccgcttcgctcgaacagctctggattttcgcaatcatctgttcgatttcctgggtcgatgtttgcgtcctgtgggccagcgcccgcacttcatcggcgaccaccgcaaagcctcggccctgttctcccgccctcgccgcttcaatcgctgcgttcaacgcaagcagattggtctgctcggcgatggagcgaatcacctcgaccacccgggcgatgtcctgggcctgtttggccagcccttcaacttccaccccggtttgctgcaccgtggagctcaacttttcaatcgaagcgatggtttgcgtcacccgctccatccccacgcttgccgaacgctgggagtcctgcgtcgactgggacgcagacaccgcattccttgccacctcctcgaccgctgccgtcatctggttgaccgccgtggcggcctgatccgtctccaggctttggcgctcaatgccggcagtggactcccgggtgatcgcactcatctcctcggctgccgacgccaactgcccggacgcctccgagatatgctgcaacgtgcttttcaggttcatctgcatggtagcggtcgatttttgcagctcggtcagttcgtcattgccgctgatggtaatggccacacgcaaatcgccgtcggcaatcttgccggtcgacaccagcagctcccgcaccggattgataatgctgcgggtcagcaagcgggccaccaccacggcgatcaacaccgaactgaccatcaacacccatgtgaacaaccgcgccgcatcatgctcactggcggcggcttgcaccgcggtcttcgagccctgttcattgatcgcaatcaaatcgctgatggaggcctgcacttggcgagcaatggggccgttgacgtcgcgcaaatacaccgccatttgttccgcggaaaagctggaggcttgcgcgaggaattcatccatcttctggctgtagttttttatctcactcagtgcctggtcgtacttggtacgctcctcggggctcgataccagcgttccataatgctcggcaacttgcagcacttcggcgcgaaccgccttgagtttttccagggaggcagggtccttgtccgcgtattccatggcgtaacgccgcaggtccaggcgaagtttgtaaaacgtcgaatctatctggccggccaggcgaatactgggcagccaattgttttctatttcgaccgtcgatgaataaaccttatcgacttttatcagcgtcatcgcaccttgtattaacagcaggaaacacaccacaccgaagcacaatgtggtacgaaagttcaacttcaaggctctcatggacatctcggctcacccttccccttggccgtgctgtacacggccttacgggtacaactttgtttaaccgagtgtgaaaaaaacgtgactacttacgcatttttttatgaatagtggcaaataaacatgacgcagatcattgcttagctaaccatcataattaacggctgttgcgactctccgacattcataccattagtccatcccgtggtaacggcagcgctgttttatatcgaacttgtttaagtgcaaaactggaccggatattggcgacgcctggcaccttggtcaaaaaatccatcatgaaacgctccagcgactggatcgtcggcaccaatacccggataaggtagtccgggtcgccggccatcaggtagcactccatcacttccgggcggtccgcaatcgccccttcgaactgctgcaacgccagctcgttctgcttttccaggctcacgtggatgaacacattgacgtgcaaccccagcaggtcggcgtccagcagcgtgacctggtcgcgaatcaagcccagttcttccatcgccttgacccggttgaaacacggcgtgggcgacaggttgaccgagcgggccaggtcggcgttggtgatccgtgcattctcctgcagggcgttgagaatgccgatatcggtacggtccagtttgcgcatgagacaaaatcacctgtttattatgtttatgcagtttttttatccgcaaatgatcctgagcgcaacgaaacagagataaatattcttctacgccacgcctatgattgttgtaggacaagatttcccctacccggggactgactgtcagctagcgcgcccactacaagaaattcacaagatagagcgtagaaagccatgacccagcagtatgaaccactgcgcctgcacgtccctgaaccctcgggccgcccaggctgcaagaccgacttcacctacctgcgcctgaccgacgcaggcaccgtgcgcaaacccgccatcgacgtagaacccgccgacaccgccgacctggccaagggcctgatccgcgtgctcgacgaccagggccaggccctcggcccgtgggctgaaggcatcccggtggagatcctgcgcaaaggcatgcgcgccatgctcaagacgcggatcttcgacaaccgcatggtggtcgcccagcgtcagaaaaaaatgtcgttctacatgcagagccttggcgaagaagccatcggcagcgcccaggccctggccttgaacatcgacgacatgtgcttccccacctaccgccagcaaagcatcctgatggctcgcgaagtgccactggtggacctgatctgccagttgctgtccaacgagcgcgacccgctcaagggccgccagttgccgatcatgtattcggtcaaggacgccggcttcttcaccatatccggcaacctcgccacccaattcgtacaaggcgtgggctggggcatggcctcggcgatcaagggcgataccaagatcgcctccgcctggatcggtgacggcgccaccgccgaatccgacttccacaccgccctcaccttcgcccatgtgtaccgtgcgccagtgatcctcaacgtagtcaacaaccagtgggccatctccaccttccaggcgattgccggtggtgaagcaacgaccttcgccggacgcggcgtcggttgcggcatcgcctctctgcgcgtggacggcaacgacttcatcgcggtgtacgctgcttccgcctgggctgccgagcgtgcgcgccgcaacctcgggcccacgctgatcgagtgggtcacctaccgcgccggtccgcattccacatctgatgatccttccaaataccgccccgccgacgactggagccacttccccctgggcgacccgatcgcccgcctcaagcagcacctgatcaggattggccagtggtccgaagaggagcatgcggcggtcagtgcagaacttgaagccgaagtgattgccgcgcaaaaacaggccgaacagtacggcaccctggccggcggccagattccaagcgccgcgaccatgttcgaggacgtctataaagagatgccggagcacttgaagcgccagcgtcaagagttgggggtctgacatgaacgatcacaacaacagcattgaagtggaaaccgccatgaccaccaccaccatgaccatgatccaggccctgcgctcggccatggatgtgatgctcgaacgagacgacaacgtggtggtgttcggccaggacgtcggctatttcggcggcgtgttccgttgcaccgaaggcttgcagaccaagtacggcagctcgcgggtgtttgacgcgccgatctcggaaagcggcattatcggcgtggccgtgggcatgggcgcctatggcctgcgcccggttgccgaaatccagttcgccgactacgtctaccccgccaccgaccagatcatctcggaagctgcgcgcctgcggtatcgctcggccgggcagttcaccgcaccgctgaccatgcgtatgccctgcggcggtggcatctacggaggccagacccacagccagagcatcgaagcggtgttcacccaggtctgcggcctgcgcacggtgatgccgtccaacccctatgacgccaagggcctgctgatcgcctccatcgaaaacgatgacccggtgatattcctcgagcccaagcgcctgtacaacggcccgttcgacggccaccacgaccgcccggtaacgccgtggtcgaaacacccgcaagcccaggtgccggacggttactacaccgtgccgctggacgtggccgccatcgtgcgtccgggctcggccgtgaccgtgctgacctacggcaccacggtgtatgtgtcgcaagtcgccgccgaggaaaccggtatcgacgccgaagtcatcgacctgcgcagcctgtggccgctggacctggacaccatcgtcaaatcggtgaagaagaccggccgttgcgtggtggtacacgaagccacccgcacctgcggctttggtgccgagctggtgtcgctggtgcaagagcattgcttccaccacctggaagcgccgatcgaacgcgtcaccggatgggacaccccctacccgcacgcgcaggagtgggcgtatttcccagggccgtcccgcgtgggcgcggcgttgcaacgggtcatggaggtctgaatgggcacgcacgttatcaagatgccggacattggcgaaggcatcgcggaagttgaactgtcggtgtggcatgtgaaggtcggcgacatggtcgtcgaagaccaggtgctggcggatgtcatgaccgacaaggcgatggtggacattccctcgccggtgcacggcaaggtgctctccctcggcggcgagccgggtgaagtcatggccgtgggcagtattctgatcagcattgaagtggaaggcgcgggcaacgccaaggatgcgccgctcgtcaaagaggcgccgaaagtcgccccggtggtggaagccaagccggtgccggcggttgtcgagagcaaacccgcgccggttgtcgcggcgcaggcgcctgtggcacgtgccgccgacgaacgcccattggcctcccctgccgtgcgcaagcacgccctggacgccgggattcagctgcgtctggtgcagggctcgggcccggcgggccgaatcctccacgaagacctcgacgcctacttgcaacaaggcacagcgaaggcttcatccaccgccaacccctacgccgaacgcaacaccgaagaacagatccccgtgatcggcatgcgccgcaagatcgcccagcgcatgcaggacgccacccggcgtgccgcgcatttcagctacgtagaagaaatcgacgtcaccgctctcgatgagttgcgcgtgcacttgaatgaaaagcacggtgccacacgcggcaagctgaccctgctgccgttcatcgtgcgcgccatggtcgtggcgttgcgcgacttcccgcagatcaatgcgcgttacgacgacgaagcccaggtcatcacccgcctcggcgcggtgcatgtgggcgtcgccacccagagcgatgtcggcctgatggtgccggtggtgcgccacgccgaggcccgcagcctgtggggcaatgccgaggaaatcgcacgcctggccacggccgcgcgcaatggcaaggccagccgtgatgagctgtcgggttcgacgattaccttgaccagcctgggcgcgttgggcggcattgtcagcacgccggtgctgaacctgccggaagtggcgatcgtcggcgtcaatcgcattgtcgagcggccgatggtgatcaagggccagatcgtggtgcgcaagatgatgaacctctccagctccttcgatcaccgcgtggtcgatggcatggacgcggcgcaattcatccaggccattcgcggcctgctcgaacaacccgccagcctgttcctggagtaaggcatgacgcagacattgaataccaccctgctgattatcggtggcggccctggcggttatgtggcggcgatccgtgccggccaactgggtatcccgaccatcttggtggaaggccaggcgctgggcggtacttgcctgaatatcggctgcattccgtccaaggccctgatccatgtggccgagcagttccagcaaaccgtgcaccacagccagggttcacagctgggcatcgaagtggatgtgccgaccctggacatccgcaaaagcgtggaatggaaagacggcatcgtcgaccgcctgaccaccggcgtcgcggcgctgctgaaaaagcacaaggtgcaggtgatccacggctgggccaaggtggtagacggcaagaccgtcgacgtcggcgaccagcgcatccagtgcgaacacctgctgctggccaccggctcgaaaagcgtcaacctgccgatgctgccgattggcgggccgatcatctcctcgaccgaagcccttgcaccgaaaagcgtgcccaagcgcctgatcgtggtgggcggcggttacatcggtttggaactgggcatcgcttaccgcaagctcggcgccgacgtgagtgtggtcgaagcacaggatcgcatcctgccggcctatgatgccgagctgacgcagccggtgaacgaatctctcaggcaactgggcgtgaagctttacctcaagcacagtgttaccggttttgccgatggcagcctgcaagtgcgcgacccgaacggcgacaccttgtcgttggccactgatcaggtgctggttgccgtcggtcgcaaacccaacacccagggctggaacctcgaagcgctgaacctggatatgaacggcgcggcgatcaagatcgacaaccgctgccagaccagtatgcgcaacgtgtgggccatcggtgacctgagcggcgagccgatgctggcgcaccgggccatggcccagggcgagatggtcgccgaactgatcagcggcaagcaccgcgaattcaacccggcggccatcccggcggtgtgctttaccgacccggaactggtggtggtcggcaagacgcccgacgaagccaaggccgccggcctggactgcatcgtgtcgagcttcccgttcgcggccaatggtcgggccatgaccctggagtcgaaaaccggcttcgtgcgggtggtggcacgccgtgacaaccacctgatcgtcggctggcaagccgtgggggttggcgtctcggaactctccaccgcctttggcctgagcctggaaatgggttcgcgcctggaagacgtcgcgggcaccatccacgcccacccgaccctcggcgaagccgtacaggaagccgcgttgcgggcgttggggcacgcactgcatctgtaaaaccgcggtgaggccatcgggggcaagccccctcccacaggggaatgcattcaaattgtgggagggggcttgcccccgatagcggtggatcggtcaaaccagaggctgaaggcgtccacccagtggctcccacacaagccaagaatgcagtattgttgcgcccatccagaaaaaaaccgacttgaccaacgatagagggtgtcatgggtaacgaaagcatcaattgggacaagctgggttttgactacatcaagaccgacaagcggtttctccaggtctggaaaaacggcgaatggcaagaaggcaccctgaccgacgacaacgtgctgcacatcagcgagggctccaccgccctgcactatggccagcagtgcttcgaaggcctcaaggcctaccgctgcaaggacggttcgatcaacctgttccgcccggaccagaatgccgcccgcatgcagcgcagctgcgcacgcctgctgatgccgcacgtgtcgaccgaagacttcatcgatgcctgcaaacaagtggtcgcggccaacgagcgcttcatcccgccgtacggcagtggcggcgcgctgtacctgcgcccgttcgtgatcggcaccggtgacaacatcggcgtgcgcaccgcgccggagttcatcttctcggtgttctgcatcccggtcggcgcctacttcaagggcggcctggtgccccataacttccagatctccaccttcgaccgcgccgccccacagggcaccggtgccgccaaggtcggtggcaactacgccgccagcctgatgccgggttcggaagcgaagaaatccggtttcgccgacgcgatctacctggacccgatgacccactcgaaaatcgaggaagtcggttcggccaacttcttcgggatcacccacgacaataagttcatcacaccgaagtcgccttcggtgctgccaggcattacccgcctgtcgctgatcgaactggccaagacccgcctgggcctggacgtgatcgagggcgaagtgttcatcgataagctggaccagttcaaggaagccggcgcctgcggtacggcggcggtgatctcgccgatcggcggtatccagtacaacggcaagctgcacgtattccacagcgaaactgaagtcggcccgatcacccagaagctctataaagagctgaccggtgtgcagaccggcgacgttgaagcgccgcaaggctggatcgtcaaggtctgagccacctggaaaaacccgccatctggcgggttttttcattgttcggggatattcaccactagcttcttgcccatgctgatcctgggttccaccccataccccaatgcctcgtagaacccgacgaccccctcattaccactggtgatctgcaggttgatcttcatgcagcccagcgccgtcaatgcctgttccgcatgccgcaccagcgacgaacccaggccatggcgccggtagtccgcatgcaccgccactgaatacagccagccacggtgcccgtcatacccggccagaatcgtcccgatcacggtttttttgtccgtcgcgacgaagaacaaaccatcgttgaccgccagcttcttatcaatcgccagggcgggcaggttgtgcgccgtttcgtagccaaacgcctcttgccacaacgccactacctgcgcccggtgctgacggtcgcgatacggcccgatgggatgccgggacagcagggccttttccatcaccaacgtacgttcgctgccgtgataaacgtcgcgcacggtgtgaaaccccagcttggtgtagaacggctcggcggtcagcgaagacggcacgctcagcaccgtcaccccgtcttcgcgggcgcgtagctcgatttcgatcatcaacagccgaccaatgccctgcccttgcaactccggattgacgaacaccgagcgcaccacattcgcatccagcgctgcggtggcgacgatcacctgatcctgaatcgctaccagcaccacgcggcgcttgagcaacgccagcactgcctccggtgtgaagttgctggcgacccgcgcaatcacctccgtcggataatcccgcgcattgctgctgtgcagggccgcgaggatgacctggctgatcccttcggcatcggcttcctgggcgagacgaacggcggtagacatgattcctcctggctgacacagctgcaacaaacaccatcctaccaatgtgggagggggcttgcccccgatagcatgctttcagatatagattttctggctgacccaccgctgtcgcgggcaagccccctcccacaggttgcatgcatttcactccggcagccgattcggctgccctacccaacttttcagctttcccggctgaaccacccctcggtttcagccgggattcaccccgcacaacccacaaaatagccccacagctcaccccatggatttcgtgcccccatgcaaaccaccaacaccgtcttgatgattcgcccggcgcgctttgccttcaacccggacaccgcaatcaacaaccgtttccaacgccagcctctcgacccactccacgcacagcagaaagcgctggaagagttcgacggctatgtcgccaccctgcgcaatcacggcgtcgaagtgctggtggtgcaggacaccccggcgccccacacccctgactcgatcttccccaacaactggtggagcagccacgccgacggcagcctggtgctgtacccgatggaaggccagaaccgacgactggaacgcgacaaaggcgtgctgcaagtactggagcaacgttttgcgatcaacagcaccatcgacctcagccacctcgaacaacagaacatcttcctcgaaggcaccggcagcatggtgctcgaccgccagcaccgcatcagctacgcctgccactccgggcgcacccaccacgacgccctgcgtcagttcgccgagcgcctcgactaccagctttgcgtgttccacgcggtcgaccgccaccacgcgccgatctaccacagcaacgtgatgatgagcgtcggccgcaacctctcggtggtgtgcctgcaagccctgccgattgccaatgagcgccaggccctggagcgctccctgcgcgacaccggtaaggacatcgtcgccctcgacttcgaccagttggaagccttcgccggcaacatgctcgaagtccacgaccgcgacggccagccgctgctggtgatgtcggccagcgcctggggcgctctgcaaccggcgcagcgccaacatatcgagcgccacacccggccggtggtggtgaacatcgacaacatcgaacgcatcggcggcggcagtgcccgctgcatgctggcggaagtgcatctgcccgcccgtccctcatttcaataaggagtcttgccatgacccgctatatcgacgtcaacgacctctgctacctggtctcgcaaaaaggcctgtccacctgcatcaccgaaatggccgagtacatccgcgccgactacctgcgctggcaagatttcgaaaaatgcgcgcgcctggccaaccactcgccggacggcgtgatcgagctgatgccggtgtccgatgcgtcgctgtatgcgttcaagtacgtcaacggccacccgaaaaacaccctggcaggcatgctcaccgtaatggccttcggcgcgctgggcgatgtcgacaccggcctgccggtgctgctggcggaaatgaccctgaccaccgcgatccgtaccgccgccacctcggcgctggtcgcccgctacctggcccgcgagaacagccgcagcatggcgctgatcggcaacggttcgcagagcgaattccaggccctggccttccacgccatgcttggcatcaatgaaatccgcctgttcgatatcgacgccaaggccactgccaaactggccgccaacctcaaggccttcccggcgatcaaagtgatcctggccggcagcgtggctgaagcggtcaaaggcgccgacatcgtcaccaccgtcaccgccgacaaggcctacgcgacgatcctcaccgacgacatgatcgaacccggcatgcacctcaatgccgtcggcggtgactgcccaggcaagaccgagctggaccgacgtatcgtcgagcgcgcccgggtgatcgtcgagtacgaaccacaaagccgcatcgaaggcgaaatccagcacatgccggaagattcgccggtcacagagctgtggcaagtgatcaacggccagcagccaggccgcgagaatgcgcgccaggtcacgctgttcgactcggtgggttttgccattgaagactactcggccctgcgctacgtactcgacgtcgccaaggcgctggatgtgggcagcacacttgaactggtgccggacctagccgaccccaaagacctgttcgcacgcctggcccaacagccccgcgtacagcagaaaaagcgcgcctgagaccgctctggcctgctgctttgcgtcgagggcgggccattttttcagggaggaaaagccgattcagcgggtgtcacagccgattccgctgcattgccagttttaacagcgcaatttgcgctttatgcgaggggtaaacgacacaaaaaacgcaccatcatgaagcattctctgctcccagttattcactgccctgacatcaattacaaaatatagggacctgcacatgactccattgcgatcactcttcgccgcgctgctgttgccactctgcgccacctccgcccacgcccaggactggaaagaaatccgtttcggcgtgttccccgaatacccgcccttcgaatccgtggccgccgacggcagcctgcaaggtttcgatatcgagctgggcaacgcgatctgcgccaagctcgaagtgaaatgcacctgggtccacaatgaattcgacggcatgatcccggccctgcgcgcgcgcaagttcgacgcgatcatgtcgtccatggccgtcaccccggcccgtgaaaaaatcatcgacttcagtgaccggctgttcctcagcccgacctcggtgatcacccgcaagagcgccgacttcggcgacaccccggaatccctcaagggcaagcaagtcggcgtactgcaagggtcgttgcaggaggcctatgcccgtgcgcacctggccaagctcggcgcgcagatcaaggcgtaccagtcccaggaccagaactacgccgacctgcagaacggccgcctcgacgcgaccctgaccgacaagctcgaagcccagctcaacttcctgtccaagcccgaaggcgccgacttcaagaccggcccggccttcaaggacccgaccctgcccctggacatcgccatgggcctgcgcaagaacgaccaggaattgcgcgcgctgatcaacaagggcatcgctgcggtgcaggcggatggcacttacgcgcagatccagaagaaatactttggtgatcaggacatctaccacgagtgatgctctgacctcgctgtggaaacttgcttgtgtgggagggggcttgcccccgatagcggtggttcagtcaactgatttggcactgatacacctctatcgggggcaagccccctcccacaaaaggcagcgtccacagtcaatctctgtgctccatcgagatcatttccatgaatgaattcctcaacttgcaaggctacggcccgatgctcgcccagggtgcgtggatgacgctcaagctgtccttcctcgccctggccttgagcctcgccctcggcctgatcgccgccggcgccaagctctccagcgccaaatggctgcgggtgccggccacgctctacaccacgctgatccgcagcgtgccggacctggtgctgatcctgctgattttctacagcctgcaactgtggctcaacgacctgagcgaactgttcggctgggactactttgaaatcgacccgtttaccgcaggcgtcgtcacgctgggcttcatctacggtgcgtatttcaccgagaacttccggggcgcgatcctcagcgtgccggtcggccaactggaagcggcgaccgcctatgggcttagccgctggcagcgctttcacctggtgctgttcccgcagctgatgcgttttgccctgccgggcctgggcaataactggctggtgctgctcaagtccacggcgctagtgtcgatcatcggcctgtcggacctggtcaaggccgcgcagaacgccggcaagaccaccaacgagccgctgtacttcctgatcctcgcgggcctggtgtacctgatgatcaccaccctctccaaccgcatcttcaagcgcctcgaacggcgctacaacctcggcatcaaggggatggcgcgatgatcgaactgttccagcaatacggcctggcctacctgctcagcgatggcgcggggctgtccggcgtggccatgaccctgtggctgttcatcgtctcggtggtgttcggcttcgtgctgtcgattccgctggcgctggcgcgggtttccgagcacttctggctgcgctggccggtggaggtctacacctacctgttccgtgggacgccgctgtatatccagttgctgatctgctacaccgggctgtacagcctggaagtggtacaggacaacgccctgctcaaccagtttttccgcaacgcgctgaactgcaccctgctggccttcgtgctcaacacctgcgcctacaccgtggaaatcttcgccggggcgatccgcaatattccccacggcgaaatcgaagcggcccgcgcctatggcctgcatggctggcggttgaacctgtttgtggtagtgccggcagctctgcgtcgcgcattaccggcctacagcaatgaaatgatcctgatgctgcacgccacctccctggcgtttaccgctaccgtcgccgacatcctcaaggtggcccgcgacgccaatgccgagacgttcctgacgttccaggccttcggcatcgccgccctgctctacatgctgctgtcctttgcactggtgggcctgttccgactggccgaacgtcgctggatgcgttttcttgttcctacccgaggctaacccatgaatcagtccgcgcaggccctggccacttatcccgttgacgaacccgtagccaaacccgccaccgctgccatcaagctgcaagtcgaaggcatccacaaacgctacggcgaacacgaagtgctcaagggcgtatcgctgaatgcgcgcaatggcgatgtgatcagcctcattggcgccagcggctccggcaaaagcacgatgctgcgctgcatcaacttcctcgaacagccagacgccggggtgatcaccctggatggcatcagcctcgaaatgcagccaggccgcgccggcacccgcgcgccgcaccaggcccagttgcagaacctgcgcacacgcctggccatggtgttccagcacttcaacctgtggagccacatgaccgtgctggaaaacatcaccatggccccgcgacgggtgctgaacgtgagcgccgccgaggcggaaaaacgcgcgcgcctgtacctggacaaggtcggcctgccgggccgcgtggcggatcagtacccggcgttcctgtccggcggccagcagcagcgcgtggccatcgcccgagccttggcgatggaaccggagatcatcctgttcgatgaaccgacttccgcactcgacccagaacttgtaggagaagtcctcaaagtcatacagacgttggccgaggaaggtcgtaccatgctgatggtcacccacgaaatgggctttgcccgccaggtgtccagccaagtgctgttcttgcatcagggcaaggttgaggaacaaggcgatgccaggatcctcgaccaccccggcagtgagcgcctgcaacaatttctttccaaccgtttgaagtgaaccccatggataccaaggccaacggaccccattcctcccctgcgctggaccgcatcgatgaggccatcatcgaagtgctgcgccatcaggggcgcatcacctacgaaaaactctcgtcgctggtgcacctcacgcccaggccttgcctggaacgggtgcgcaagctggagcggcgtggggtgatccgtgggtatggggcgatcatcgatgtgcagatggtctcgccaggcttgtcattgctggtcctggtggccttgtccaaccaaagcgggcgctcggcgcaaaaggccttcgaagcctgtgtgaaagcctgcccgcaggtgttcgaatgccagctgatcagcgggccgttcgactacagcctgcgcatgcgttgccgggacatggagcactatcgagtgctgacagaaacctggttgaacaatgacgagctgcacatcgataagttggtggcgcatccggagttggcggtggtcaagaacaccgccaccgagctggcctgaacttatcgctccaaaacaccgcaaatctaatgtgggaggggcggtgcgacgattcgacttgcccccgatgagggagtgtcagttaaaaatgtatagactgacacactgctatcgggggcaagccccctcccacatattcaaccctgcccgcttaagatttttttgccaggcttggtgccgatcagcctggcctgcccatccttctgcttccccgtccgcgcctcgctgatcaaccccggtatcaacttgccctccggcaggttcttccagaaccggctgggcaagtgcccttccatcaccttggggttcaaccgcgccgggttgaagatgtggctgtaataggtcagccacatcgcattgtgggggtcctcgacattctgcgccaactgccgccacgcctcggggcattcacgctggtggatcaactgctcgccgtcgtagtagaccccatccagcggcgtggcgatcatccagcgatggcggcccatgcgcccgataaagtgctggctggctgatttcaggatgtcatgggctggctcgtgccaggccacgtattccggcagttccggccccgctcccgccggcagcgcgataaaccgcacaaacgcatgcaggtggtgcgcctcgcggctgacctgcttgatccgccgctgcaactcactgcccagcttgtccccggccagcatcgcggtgcggtcgccatggctgacgcgccataacacttcgtacaacaagctccaacgctggtcgccgtgatagcaggcagccgactccagcagttccaacaacgctttggggatccgcgcctggaacggccccaggccctcagggatcggctcatcggtggcaaacaggtccgccacctccgcctcgccccagctcacctggctggggtcgacctgatggctgagcagccagcgcgcctgatcgcgccaggtggcgaacaggttgtcgcattccaggctgatcacccccacaaccccatctgctgcggttgcgggcgatcacgcagttgttcgcgcagcaatacgctggtgctgtcggcctgttgcgggtggtagtcgctggtgatgaaaaacggcttggccttggccagtacgcagcgcatgcgcgccaggtcttcgaagcggatcttgcgttcgcggcgcaggtccaccaggcgctgggtggtgcgcaggccaatgcctggaatgcgtgcaatcaaggtcggttcggcgcggttcaggtccagggggaacacgtcgcgattgtccagggcccaggccagcttggggtcgatgtccagggccaggtggccagggcctttgaacagttcattggcattgaacccatagctgcgcaacaggaagtcggcctggtacaagcggtgctcgcgcatcagcggcggcgcggccagcggcacgcttttcgggctgttgggaatggggctgaacgccgagtaatacacgcgacgcagcttgaagttgccgtacaacgcctcggcaccgtggaggatggtgctgtcatctgtgtcgtcggcgccgacgatcagttgcgtgctctgcccggccggcgcaaaacgcggtgcacgcggttcgttgcgcacggtctgctcgccggtgtagatggtctgcatggcctgcttgatcgagacgatctttttttccggcgccagggtctgcaagctggcctcggtgggcagttcgatgttcacgctcagccggtcggcatagcgcccggcctcggcgatcagcgccgggtccgcgtcgggaatggtcttgaggtggatatagccgcgaaagtcgtgctcttcgcgcagcagcttggccacgcgcaccaactgctccatggtgtagtcggacgaacggatgatgccggagctgagaaacagcccgctgacgcaattgcgccggtagaaatccagggtcagagtgaccacctcctccgggctgaaacgcgcacggggcacgtcgctggagcggcggttgacgcagtactggcagtcgtagagacagaagttggtgagcagcaccttgagcaacgacacgcaacgcccgtcgggcgtgtagctgtggcagatgcccatgccatcggtggaacccagccccgccttgccctcggagctgcgcttgggcgcgccactgctggcgcacgatgcatcgtacttggcggcgtcggcgagaatgctgagtttttcgatcaactgcatggagggctaccgatactggttttttgtacagtatcagccaaccctccgggtcacaagtgcagcctgtcagcttgccgtggcgagcaacaggtcctgcaccgagcgccccttgccgcgcccacggtccagggcatacaacgacgctgcaatctcatcggcgcgaatcggcagcaccgacagcaaggtgtcgctcaagccatggctggcctggctgaaaccctggatgtagatgccggcgttgcagcgctcgtcggtgacgatgcggtagtcgcgtgccacttcgaagtcgcccaggtagtcttccaacggcgccagcaaggcgcggtgtgtctggcgctcgtagccggtggccaggatcaccgcgtcgtaatggttgacgctggtgtcgccgttggcgttgttgcgcagcgccagttcgatacccagcgggccgggggtggccttctcgaccacggtcatggtgcggaacgcctggcgggcgatgccggagactttctggcggtagaaaatgccgtagatgcgctcgatcaggtcgaggtccaccaccgaatagttggtgttctggtactcggccaccaggcgctcacgctcggcgccctcctgctggaacaccaggtcggtgaaggccggcgagaacacttcgttgacgaacgggctgtcatcggcgggcttgagcgccgagccgcgcaggatcatgtcgacctgcaccgacgggaagctgtcgttcaggtcgataaaggcttcggccgcactctggccgccgccgatgatggcgatgcgcatggccttgccgtcgacacacggctgggtggccatgcgctccaggtattgcgaatggtggaacacccggctgtcgcctttaagcgccttgaacgcctcgggaatacgtggcgtgccaccggcgctgaccaccaccgaacgggtggtgcgcacatgctgctcgcccagggcatcgcgggagatcacgcgcagcgcttcgacctgctgctgatgcaggatcggctcgatggccagcacctcctcgccgtagcgcgcctgggcctggaactgcccggcgacccagcgcaggtagtcgttgtactccatgcggcacgggtagaaggtgcccaggttgataaagtccaccaggcggtcgtgggctttcaggtagttgacgaaggagtacgggctggtggggttgcgcagggtcaccaggtccttgaggaacgagatctgcagctcgctctgggttaccagggtattgccgtgccagcggtagtcggcctgtttgtccaagaacagcacgtccagtttgccctgggccttttcgcgctcctgcagggcgatggccagcgccaggttcgaagggccgaaaccgataccgatcaggtcgtgaaccgcgggcgaagcaattgcctgtgtcattccagtgtcctctggataagccccttggcggtggggcgggaatacctttcaaggcctgaacaacaggccgtgtgttgataggaaacgaggacagtgaaataaaatttaaccgatcattgatcagtgtgcttcccactcgcgcatccgtacccggcagtgcttcatggcgttgacgatgtgtttttccaccagggcgcgggaaatgcacaggcgttcggcaatctgcaagtgggtcaggccgtcgagcttacgcagcaggaagctgtcgcggcaggccggcggcagttcggccagggcgcgttcaagcagctccaggcgctggccgtgggcgtgggtggtgtgcggcgaactgctggcaaagcgttcttcggcatcgagtacgtccagcggttcgacctggcgcaaggcgttgcgccgatggccgtcaatcaccaggttgagcgcagtacggtacaaaaaggcacggggttgctcgatgggggtgtcgctggaacgttccagcacccggacatacgcgtcatgcaccacatcctcggcgacctgacggttgcccagcttggcgttgaggaaacacaccagctcgcgatagtagttttccaacatgactcccggccgcggggtagcggcattaggtccccgggtgcaaaaaagacagcgttaaggtaatggcagtttgagtgcgtgcaatttatagtaattctcatctacttttaaagcagacttgcatcaacggacgatttttttcttcaagggagctgtaactgcttatgtaaccgcctaaatccccgcgcaattctctcgtttacttgtcagctccccgcaactgcggtccgaactttcctggctggaaacccacgcatgaaacgccctcgacctgcccgacgcgccttgctcgttatcgcgtgcctgatccccatcatcgccgtcgcggcctggcaggtgctgccgccggggcgtgacaccctcaccaccgtcaccgtcacccgcggcaatatcgaaaacagtgtgaccgccctgggcaccctgcaaccgcgccgttatgtggacgtgggcgcccaggcatccggccagatccgcaagatccacgtcgaggccggcgaccaggtgcaggaaggccagttgctggtggagatcgacccgtccacgcagaaggccaagctcgacgccagccgctacgccatcgagaacctcaaggcccagttgcaggagcaaaaggcccagcacgaactggcgcgccagaaataccagcgccagcagcgcctggtcgccggcaacgccacccgcgaggaagacgtgcaaaccgccaaggcggaactgagcgccacccaggcgcgggtcgacatgttccaggcgcagatcctgcaagcccaggccagcctgcgcagtgatgaagccgagctcggctacacgcggatttatgcgccgatgaccggcaccgtggtcgcggtggacgcccgcgtcggccagaccctcaacgcccagcagcagacgccgttgatcctgcggatcgccaaattgtcgccgatgaccgtgtgggcggaagtctcggaagccgatatcggccacgtcaaaccgggcatgaccgcctacttcaccaccctgagcggcggtaaccggcgctggaccagcaccgtgcggcagatcctgccgatcccgcccaagcctctgaatcagactcaaggcagcggcagccccaacagcacgaataaaagcggcagcggccgcgtggtgctgtacaccgtgttgctggatgtggacaacggcgacaacgcgttgatggccgaaatgaccacccaggtatttttcgtcgccagccaggccaaggacacgctgacggcaccggtcgctgcgctgcagggcacgacgaacgccaaccagcagatcgcccgggtggtggccaagaatggccgcatcgaacagcgccaggtgcaggtcggcatcagcgaccgcctgcgcgtgcaagtgctcgacggcctgaacgaaggtgatcacctgctggtcggcccggccgacggcaacgggggttgaggtgaacacgcccctgatcgaactcaaggacatccgcaagtcctacggcggcggcgacagcccgcaggtcgacgtattgcgcggcatcgacctggcgatccatgccggggaattcgtcgccatcgtcggcgcttccggctccggcaagtccacgttgatgaacatcctcggttgcctcgaccgccccagcaccggcgactacctgttcgccggggaaaacgtcgcgcacctggacagcgacgaactcgcctggctgcgccgtgaagcctttggctttgtgttccagggctaccacctgatcccctcgggttcggcccaggaaaacgtcgagatgccggcgatctacgccggcatcagcgccgccgagcgccatgcccgcgccaacgccctgctcacccgcttgggcctggccgagcgcaccggcaaccgtccgcaccagctttccggcggccagcagcaacgggtgtccatcgcccgtgcgttgatgaacggcggccatatcatcctcgccgacgaacccaccggcgccctcgacagtcatagcggcgccgaggtcatgaccctgctcgacgaactcgccagccagggccacgtggtgatcctgatcacccacgaccgcgaagtggcggcgcgggccaaccgcatcatcgagattcgcgatggcctgatcatcagcgactcggccaatgacagcgacgcgaaacccgtggccaccagcggcgccctgcaagccgtggacctgcgccagcgcctggccgacggcgccgagcacaacggcgcctggaaagccgaactgatggacgcggtacaggccgcctggcgtgtgatgtggatcaaccgcttccgcaccgcgctgaccctgctgggcatcatcatcggcgtggcgtcggtggtggtgatgctggcagtgggcgaaggcagcaagcgccaggtcatggcgcagatgggcgcgttcggctccaacatcatctacctcagcggttcgtcgccgaatccgcgcacgccgctgggcatcgtgaccctcgatgacgtgcatgcactggcgtccctgccgcaggtgcagcgcatcatgccggtcaatggcaacgaagccggggtgcgttttggcaatgtcgactacatggcctacgtgggcggcaatgacaccaacttcccggagattttcaattggccggtggtcgagggcaattacttcactgctgccgacgaacgtgcggctgccaccgtggcggtgattggacatcgcgtgcgcgagaagctgttcaagggtgaggtcgaccccatcggccagtacatcctgattgaaaatgtgccgttccaggtgattggcgtgctggcggaaaaaggcgccagctccggcaacaaggacagtgacgaccgggttgccatcccttacaccgccgccagcgtgcgtctgttcggcagctacgaccccgagtatgtggtgatcgcggcggcggatgcgcgcaaggtccgcgaggccgaagtggccatcgaccagttgatgcaaaagctgcacaacggcaagcgcgactatgagctgaccaacaacgccgcgatgatccaggccgaggcgcgcacgcagaacaccctgtcgctgatgctcggttcgattgccgcgatttccctgttggtgggcggcatcggcgtgatgaacatcatgttgatgacggtgcgcgaacgtacccgtgaaatcggtatccgcatggccacaggcgcacgccagcgcgacatcctgcgccagttcctcaccgaagcggtgatgctttcggtggttggcggcctgtgcggcatcgccctcgcactgttggtcggcggtgtgctggtgctggccaaggtggcggtgcagttttccctggtggcggtgttcggtgcattcggttgcgccctcgtcaccggcgtcgtattcggcttcatgccggcccgtaaagctgcccggctcgatccggttaaggcgttgaccagtgaataaacgatccctttacctgcccggcctctgcgtattgctcagcgcctgcaccggcaacccgccagccctggacagcggcatcgcaccgccggccgcctggcaatataccgagcgtgcggcggcgcaggccaccaaccggcaatggtggacacagttcggcagcccgcaactcgaccgcctggtcgatcaggctcgccgcgacagctacgacgtagctgccgccaccgcgcgcgtgcgtcaggcccaggccagtgcagtgatcgccggcgcaccgctgttgccggaggtgaagttcaacctcgccaccagccgtcaaaagttgctgcgcggaccgggcgggcccgatctggatgcgtcacgcaccaatgatgccgtcgacaactttggcgccaacctcaccgccagctacgaagtggacttctggggtggccgtgccgccgcccgtgacagtgcgctgcatagcctgcgcgccagcgagtttgaccaggccacggtggagctgaccttgctcagcagcgtggccgaccgttacgcgcaaaccctggctgcccaccagcgccagcagatcgccgaactcaacctggcgaacgcgcgcaacgtactcgacctggtgcagacccgctatgacgccggctccgccactgccctggaactggcccagcaaaaaagcctggtcgccagccagcaacgtcaactgccgcttatccagcaactggccgaagaatcgcgcatcaccctggccgccctcctcggccagcccgtgcaggccctggagctgggcagcgaaccgttccaggccctcacctggccgaccatcggcgccggcatgcccagccagttgctcagccgtagacccgacatcgccaaggccgaggcgcaactggcggcggcgcaagccgacgtcaccgtggcgcgcgcggccatgctaccagccgtcacccttggtgcgacgcttggctccgacgcttacaaggccgcagacattctgcgcagcccctactacacgctgaccgccggcctggtcggcccgatcttcaacaacggccgtttaagcgctgaacgcgacaaggcccgcgcccgtcaggatgaactgctgcaaacctatcgcggcgcgatcatcaacggctttgccgatgtggaaaaagccctcagcagcatcacccgcctcgaccagcagcgccaatggcagcgtgaagaactgcaacaggcgcagacggcgttccagatcgccgaaagccgctaccaggccggcgccgaagacctgctcaccgtgctggaaacccagcgcacgctgtacgcggcccaggaccagaatgtgcaactgcgcttgtcacgcctacaggccagtatcgccctgtacaaagcgctgggtggtggctggcagacagagatccgataaacaaaactccagtttcatacacaagacgttctttcagcctacattcttcgacccaaggtccttggtaaaaaaaccgctatcacacggttgcccgggacctctcgatgactgctgcaaaacacctgacgtgcgcctgtctctggctgctggcaaaccttgccgcagcccagccgttgatcccccccactgccatcgactggttgctggactgtcccctgcccaccgttgaacgcctggaccccgcggtactggaacgtacccaatgcggcaccgtgagcgtaccgcgcaattacgcagcgccccgccagggcaggctgcgcctgtacgtgactcgcgtcggtgcccgcgacccgctgagccgtgaaggcgtgatcattgcccaggccggcgacgcggccaaaaagaatcaggtcggcacctttgtcatccacctggccagcctgtggaacgcccactcccacccggcctatcgcaggctggtggaccgttatgacgtcatcgagctcagcacccgcgacctgagtaccgacaatggcatcgaaatggccgcccaggacctggagttcgtacgtacccaactcggtgaagctcagttgcgttacctgggcaatgccgacagcgcacgcctgggcaaccgctacgccacgctgttccccgagcgggtcacgcgcatggtgctggtcaacgcgcacgcgagcgaaatggcggcgcccttcgtcgaacaattgcgcctgaacgactcggccacacaggacgccagccgttgcatcaaccgctgggtgggcgacttcctggtctacggcaagcaacctccacgctccacgcgctgcctggattccgccgacaggcagtaaccccccgtttgcgacctgttggcctcaaaaacgacacccggcgttgacgctggggggcgatcgttattaagtgctatttatccgcattaatacgataaatcgaacccatgctaagccgcccgctacgacgcaaacgccagaagctgtccgatgtgattgtcgagtcggtcaagcgctccatcgtcaccgacgccttgaagcccggcgaccgcctgcccaccgagcgtgagctgatggaaagcttccagtgctccaagggctctgcccgcgaagcactcaaggccctggaagtggaaggcctggtgagcacccgcaccggccccagcggtggcgcctacctgaaccaggccggcaccgaaccggccagccgtgcactgcgcaactacctgcacttccagcacctggacggcgagcaggtgtaccaactgcgcaaagtcatcgaagtggaactggcggtgtcggtgctggggcgcctcagcgaagacgattatcaagccctgcaagacaacgtggatttctgcagcgccccggaagacagcgaagccggccagcgcgagcaacgcctggcggaactggagttccataacctgctggccaaggcctgccccaacccgctgctgagtttcatggcgcagtttctcaacgacctgctgcgcgacctggtggtgctgaaaaaagcctacaagcccaagcgcaagcagttcgacgcggccaacctggattatcacaagcagttgctgatcgcctttcgtgccggggatgaacgtgcggtacgcagcttgatgcatgaacacatgtgcgatgccgaacaccacatgaccgcccttgaaggccaggtcagcccgcattttctactggagttcgatcactcttaaggaacaccacagaccccatgtgggagggggcttgcccccgatgacgccagcacactcaatattcatgtcgactgacacaccgccatcggaggcaagccacctcccacagttgggctgcatttcaaccacacaccgtttcatccaataacaggcctgcccacaggcccttgctccaccgtatcgccattgccactcctgccaataactaaaccagggagtcaccccatgcagcgtcgtacgttgttgaaagccagtctcaccgcagccgccgccctcagcctcccgctgagcgtgcgttcggcatttgccgccgagccctttaccttttacggcctcaagtccatgtctggcgcgtttgccagctatggcaagtttgccgacatgggttcgcgcctggcggtggaacagcaccccgaggtgctcggtcgcccgttgaactacaaagtcatcgacaccgaaggcaacgccggcaaggcggtgcgcaaggtccaggaagccatccagcaggatggcgcgctgttcttccaggggtgcaccttgtcgtcgtcggcactggcggtggccaaggaagtcgacaaggtcggtggcgtgttcatgaccccggtgggcgccgatgaagtcaccggcaaggactgcaacaaggcgacgttccgctggtcggtgcccacctacggcgcgatccgcgaaaccctggtgccgttgatcaaactgctgcccgaagccaagcgctggtacaccatcaccccgcaatacgtgttcggcgaagccctgcttgaaggcgccaaaaacgtgctcaaggaacacggcctggagcatgtcggcaacagctaccactcgctgcaggagcaggaattttccggctacctgaccaacgcgatctcgaccaaacccgacgtgctggtgctgctcaacttcggcagccagtcgtccaacaccctgcgccaggcggtgaatttcggcatcaaggagcgcatgaaagtgctactggtgtggtccgccggcctcgaccagttccaggaattgggcagcgacgtgctggaaggcgtgtacctcggcgcgcagtactggcaccaggtcgacaccccgctcaaccgtgaactggtcaagctcacccaggccaagtacggcatcaaccccacctacccgctggccgccgattacatcagcaccaaggtcatgctcgaaaccatcattgccaccggcagcttcgacgggccgaccgtggccaaggccatgcagggcctgagtttcgaagggccgaccggcaaggaatcgatccgcgccggtgaccaccaggtgatcaaggattactacctgctgatcggcaaggccagcaacgacatggccgacaaggatgacctggccaaagtgctcagcgccggccagtcgttcccgccggtggacgccacgggctgcacgctcggctgatccgctgaattttgtagcgcaaggccgcgcaagcggcgtcctgccgagggttcctgcatgcttaatctttacctgttccagatcctcaacggccttgggctggggatgatctacttcctcattgcggtcgggctgacgatcattttcggcctgctcaatttcgtcaacttcgcccacggcgcgttctttctgctgggtgcctacatctgctacaccgccgtgagcctcaccggcaacttctggctggcgctgctgatcgcgccactggtggtggctgcgttggcctgggtgatcgagcgcctgttgatccagcgcatctaccacttgccgcacatgttccagatcctggtgaccctgggcatcgcgctgatcatccaggaggccagcgtgatgatctggggcccggtgggcaagagcgtcgcggtgccggaactgctgcgcggcgtgctggtggtgggtgatttcgtctacccctactaccgcctgttcctcattgtgttttccgggctggtcggcctgggcctgtggctgctgctggaacgcacgcgcttcggcgccctggtgcgcgccggcagtgaaagcaccgaaaccgtgtcgctgctgggcaccaatattttccgcctgttctccatgaccttcgccctcggcgtggccctggccggcgtcgccggtgtgctgtttgcaccgttgcgcggcgcgcagccctttgtcggcccggagattctcggcgtggccttcgtggtggtggtgatcggcggcatgggctcgttcagcggtgcgctggtcggcggtttgctggtgggcgtagtgcaaagcctgatgaccacactctggccccagggtgcgagcctgatgatctacggcgcgatggccgtggtgattctggtgcgcccttacggcctgttcgggagagcctgacatgagcgagaaaaatcccctgccgtttgccaagacgcaatcgcgcgccatgttgctgtgggtgctggcggtactgatcggcctgccgttgatattgccctcagcaaccctggccaccgagatcctgatctttgccatggccgccctggcctgcaacctgttgctgggctacaccgggctgctgtcgtttggccaaggcattttcttcggcgccggcgcgtattgcgcggcgctgctgatgatccacctgcaactgggcctgttcactgcgttgctcggcgccgccatcgccggtggcttgctggccttgctggtgggcgccctggcgatccgccgtaccggcatctacttcgtgatgctgaccctggccttcagccagatggcgtattttgtcgcctacaccctcagcgactggaccggcggcgacaacggcctgctcagcgtgccgcgcccggaaatccgcctgggcgacaccgtgctgttgtccctggccgacgcccgcgcgttctacggttttgtcgcggtactgttcctgctgatcttcatcggtgcgcgccgggtgatcgcctcgccgttcggcagcacgctgatggcgatccgcgaaaacgaaacccgtgcctcggccatcggctacgacacgcggcacttcaagatcctggtgtttgtgctgtccggcgccgtcaccgggattgccggggcgctgtacgccatgctgctgcactttgtgccgctgtcgaacatcgacctggcgatgtccgagaacatcctgatcatgaccatcgtcggcggcaccggttcgctgttcggctcgctgctgggcgccggttccatcgtgctgctcggggattttctctccgacctgtggccgcgctggctgatgctgctgggggtgatcctgatcctggtggtgatcttcatgcgcggtggcttgtggggcggcctggcgtcgctgttcgagaaggtgcgcggcagccgcaagagcgtggttgtcgccaaggaggaagggctatgagcatcctgctggaaacccaggacctggaactggcctatggtgcgttccatgcggtgaatggcgtcaacctcaaggtcgaggccggcaccatccacaccatcatcggccccaacggcgccggcaagaccagcctgttccactgcctcaccggcgagcgccaggccaccgccggggcgatccatttcgacggccggaacctgatgcgcaaacccgcccacggccgtgtcggcctgggcatggcgcgctcgttccagctcaccagcctgttccagaacctcagcgtgcgcgagaacctgcgcctggccgcccaaggccgtgacggcgcacgcgccctcaacttctggcgccgcgtagacagccagcgcgaacacctggaaatggccgaccaggtgctggagcgcctgcaactcaccgcccgcgccgacaccctggccggcgagttgtcccacggccagcaacgggtgctggaggtgggcatgtcgatctgctccaagcccaaactattgatgctcgacgaacccacctcgggcatgggcatcgatgacatcccgatcatgacccaactgatcagcgaccttggccgcgaccacacggtgctgttgatcgaacacaacatgagcattgtcatgtccatcagccaacgcatcacggtgatgagccacggccagatcctggtggagggcacgccggaattcgtgcgcgccgatgaacgtgtgcgcaccgcgtaccttggggaggctgcctgatgctgatcgtcgagaatatccattcgtactacgacaagagccacgtactggaaggcgtgtcgctcaccgtcaaccccggcgaactggtgacactgctggggcgcaatggcgccggcaagaccaccaccctgcgcagtatcctcggcatcatctgcccgcgccaaggccagatccacttcaacggccaggcgctggtcgggcagaagatcttcgaaatcgcccgccagggtttggcattggtgccggagaaccgcgggattttccgcttgctcaccgtcgaggaaaacctgcgcatcgccgcccgcaagaccagccgctggcagcttgaagacgtctacgccatgttcccgcgcctcaaggagcggcgcaaaaacgccggccacgcgctgtctggcggcgagcaacagatgctcgccatcgcccgcgcgctgctcaacgaccccaagctgctgatcctcgatgaacccaccgagggcttggccccggtgatcgtcgacgaactggtgaagatcctgcgcaaggtcaaggacgacggcctgccggtgctgctggtggaacagaacctgatggtctgcgacaagctcgccgaccgccattacgtgctcgaacaaggccgcgtggtctacgaaggcagcgccgaagccttccgtgccgaccctacgatcaaaaaccgttatttggccctgagtgcctgaccggagactgctaatgaacagttttacgcaaccgctccagagcaacgccccgctgatcaaccgcgaccgcctgtggcaatcgctgatggatttggcccaactgggcgccacggtaaaaggcggcgtgtgccgcctggccctcaccgacctcgaccgccaggcccgcgacctgtttgtgcaatggtgcgaggcggccgggtgcagcgtcagcgttgacgccatcggcaatatctttgcgcgccgtgccgggcgcaaccctgccctgcctccggtgatgaccggcagccatatcgacacccaacccaccggcggcaagttcgacgggtgctacggggtgatggccgggctggaagtgatccgcaccctgaatgatttaaagattgaaacccaagcaccgcttgaagtggtggtgtggaccaacgaagaaggctcgcgctttccaccgtgcatgatgggctccggggtgtttgccggtaagttcgacttgcaggacacactcgacaaagtcgatgaccagggcctgtcggtgggcgccgaattgcagcgcatcggttacgccggctcccgcgccgtgctcggccacccggtgggcgcgtatttcgaggcgcatatcgaacagggcccggtgctcgaggaccaggccaccacgattggcgtggtcatggggtgcctgggccagaagtggttcgacctgaccttcaccggcgtcgaagcccacgccggcccgacgccgatgcacctgcgcaaggacgccctggtcggcgccgccgaggtggtcagcgcggtcaaccgcatcgcccatcaacagcagccccacgcctgcggcacggtgggttgcctgagcctgcacccaggctcgcgcaacgtgattcccggccaggtgcacatgaccatcgacctgcgccacctgcacgcggacacgctgcaagccatggtcgatgaagtgcgcggcgtgatcgaagccaccgcccagcgacacggcctgacctttgaactgacgcccaccgccgatttcccaccgctggacttcgccccgacctgcgtcaacgcggtgcgtgacggtgccgaggccctgggcttgagccatatggacatcgtcagtggtgccgggcacgacgcgatcttcgtcgccgaactcggcccggccgggatgatctttgtgccgtgcgaaggcggcatcagccataacgaaattgaaaacgccgcgccggacgacctggcggcgggctgcgcggtattgctgcgcgccatggtcaatgcggcacagggggaaacggcatgagtgagatcggccaactgacggcggtgcaactgctgcagcattttcgcgacaagaccttgtcgccggtggaggttaccgaagacgccttgctgcgtatcgaacgctacaacccggtggtgaacgcctattgccacgtcgacccggaaggcgcgctgagtgcggcgcgcgcctcggaacaacgttggctcgacggccgaccctgcggtgcgttggacggtgtgccggcgtcgatcaaagacctgacgctgacgatcggcatgccgacccgcaagggctcgcgcacctcatccgccgaagggccgtgggacgtcgacgcgcccttcacagcctttatgcgcaaggccggcgcggtgctgctgggcaagaccaccaccccggaattcggctggaaaggcgtgaccgacaacccgctgtacggcatcacccgcaacccctgggacacgcgcaccacggcgggcggctcgtccggcggcgcaggcgcagcggcggcgttgaacctcggcgtgttgcaccagggcagcgatgcgggcggttcgatccggattccctgtgcgtttaccggcaccttcggcatcaagccgaccttcggttatgtgccgcaatggccggccagctccatgacgattctgtcgcacctggggccgatgacccgcacggtggaagacagtgtgctgatgctgcagaccatcgcccaaccggacgcacgggatggcttgatcggtgctccacgcaccacaccatggctgacgccgggtacggatttgaaaggcttgcgcgtggcctacagcccgaccttcggttacgtcgatgtcgacccacaggtggccaaggtagttgccgaagcggttcgaggcctggaacaactgggcgcccatgtcgagcagatcgacccagggttcagcgacccgctggaggtgttcagcaccttatgggcagccggcgcagcgcgcctgaccggcgccatgagcgaggcacaaaaacagctgctggaccccggactgttaaggattgcaaaacggggcgaacagctgagcctggacgacttcagtgccgcccttgaagcccgcgccgcattggtagcgcgcatggccgcgttccatgagcattacgatgtactggtgtcgccgatgatgccgatcaccgcattcgaagccgggcacgacgtaccgcccggctccggcttgcaggcatggacacagtggacccccttcacctaccccttcaacctgacccagcaaccggcggcgtcggtgccgtgtaggttggcggcgaatggcttgccggtggggttgcatgtggtgggcgcgcggtttgccgatgagcaggtgttgcgggtgtgccaggtgtatgcaaaggcattcccgaccaagcacctgcaggccccaatcaccagaacaccgtaggaccccatgtgggagggggtacacgcagatggtcctggccctatctggctgaggacgaacactgcaactgtgggtacttttcgccagttctacctaaagaccttgggagcaagcctccttccacagtatcgggcgcattcctttacactgtcccccattcatccccgggggcttcatggacatcgaactggcacgcaccttcctcgaaatcacccgctgcggcagcctcgccgcagcggccgagaaactgcacgtcacccagaccgccatcaccgcacgggtcaagagcctggaaagccaattgggcagcacactgttcgtgcgcaaccgcgccggcgcccggctgaccgccgatggcgaggccttcgtggtgtacgccaaccagttgctgcagacctgggaggccgccaaacgcgacctgccgctgcccgatggctatcgcaacgtgctgcacatcggtggcgaagtcagcctgtgcaacccgctgatgctcggctgggcccaggccctgcgccagaacattcccggccacgccctgcgcaccgaaatccgcgaaggcgaatacctgctgcgccaactggagctgggtgtactggacgccgccctggtgttccagccgcagtactggccgggcttgcaggtggagcaggtgctggaggaaaaactgattctggtgcagctggtgagcaacccggcgccctatgtgtacatcgattggggacccggttttcgtcaacaacacgacgccgccctgcccgacaaggcccgcgccgcgctgagtttcaacctggggccgctggcgttgcagtacatccttgagaacggcggcgccggctatttccggacccgcgtggtgcagagctacctggacagcggcgtgatgcaacgcgtgcccaaggcgccggagttcagcttccccacctacctggtgtattcacgggcgcgagactcggcggtgttgcaacaggcgctggggttgctgcgcgaggtggtcaaggccgaaagcgactggtcgcaacgctgggacccgctgatttgaagcaacaatatccgccgcgcatgctagcctgcgggtgtttccttttgcagccttaccgatgaacaagaaaaagtccgtcaccatcagcgacatcgccaaacaggtcggcatgaccaccatcacggtgtcacgggcgctgagcaaacctgacctggtcaagccggccaccctggcacgcatcctcgaagtggcgcgggagctggactacgtgcccaacgccttcgcccgcggcctcaagcgcagtgaaagcctgatcatcggcgtgatcacggcgtcggtggacaacccgttctacagtgaaatgatcaaggcgatttcccgcgaggccaagcagcacggctacaccatcatgctggtggacaccgatgagctggaagaactggaaagcaaggccgtggacaccctgctgggctaccgcgtggcggggatcatcctgtcgccggtctcggatgagccgggctaccagcccgactacctcgaacgcctggccaacggcaagaccccggtggtgctgctcgaccgcacgatccacgacagcccgttcagccgtgtggtgctcgacaactaccacagcggcatccaggccgcgcactacctgctgcgccagacgcccgacctcaggcgcctgctggtgctgaccggccccgaacattcacgcatcaccgtggagcgcctcaagggcctgcgcgaagtgctggccgaacacccgcaggtgcaggtcgaagtgcaggccggcgactacacgctgatgccctcctacctgcataccctcgactacctggccgaacactcggcgccggacgcgatcatggggttcaaccagttgatcaccctcggcgcgctgcgcgcgttgcgcatgcacaacatcccccacgacagcctgaccatctgtggcatcgaccgcctgcccttcgccgatatcttcggcgtgcccatcgcctgcgtggcccatgatgcgtccctggccggcagcagcgcggtacgcctgctgctcgaccgcctcgaagacccgagcaagccgcgggacaaggtggtcatcgctggccagttggaaaacggctaacgactggtataaccgccgtcgatgggcaggctgacgccgctgatcatgctcgccgcgcggctcagcaggaacagcaccggcagggccacttccgcggtttgcgcaaaacgccccaaaggaatcgccgccagcgccgggtcacgcttggccggtgcggaccacgccatggtcgccatcggtgtgagcgtgaccgttgggttgacgctgttgacgcgaatgccgaagcggccccactcggcacattgcacgcgggtgatcgcatccagcgccgccttggaggcgcagtagccgaggtgatcgtccagcgccaccaacgaggcctggctggagacgttgacgatgctgccggcgatctgcgcttcgatcattttcgccgccacacggctggcgacctgcgcagcggcgcgggcattgacgttcatcacctggtcaaacgcctcggcgctgatggcagcggcaggttccaggcgcgagatgccggcgcagttgaccaggccgtgcagcggcggcaggtcttgcagggctttgtcgagggccgtgctgtcagcgatgtccaggcagaggctgtggcaaccgagttgggccagggcctgcgcgtcgcggccgagggcaaacacgtcggcgccgctggcgatcagttgcagggcgatttcacggccaatgccgctgctggcgccggtgacgaggatgcggtggtgggtgaagtcgaaggcggcgttcattcagttctcctgcaggctgtgcatgatcggtttcagggccggataaagcttcaggtattcgccgaatgcacggtcatacgcctcgacgttttgcgccttgggctcagcgcgcagctccagttgcacccagcccttgtccatcgccgcatcactcaccaaccccaccgtatgcgccgccagcaacgccgcgcccaacgccgcctcaacctcctgaacgatggtgtacaccgggtaccgcgtgacgtcggcgatgatctgcatccacaggtccgaatggctcgccccgcccaccacgatcaagcgcgggtccagggagtgcgcaccgcgcgtacccgcttcgatgttatgccgcaaggcaaaactcacgccttccagcacggcgcggtacaggtggatcctggtgtggtacaggttcaagccgacaaaactgccactggcgcggtcatcccacaccgggctgcgctcgcccatcaggtagggcaagaacaacaggccctcactgcctgccgggatgtgcatcgcccgctgttccagcagcaccaggctgtcctggccgctggccttggcctgttgctcttcggcctggcagaactgctcgcgaaaccagctcaccgaagccccggcggtgatcgcaccaccgaagatgtacaggtcacggtggccgttgtagacgtggggcatgctgaccaggccatggcgcgcatccacctgctggttgaggtaaccccagcacatgctggtgccgatcatcgccacgtggttgcccggttgtgtcacccccgccgccagcgtggccatggccgcatcgacgccacccgccaggatcggcgtgccggcctgcaggcccaggcgtgtcgcccaggcctcaagcaaaccaccgaccacctccccggaatgcaccaagcgctgcggcatcatggcctgcgggatacccagcgcatcgagcatctcggccgaccagccacgcgccttcacgtcgtagacgccaccgatgttgccggcactgctgtggtccaccgccaactcaccggtgaagcaccagttgatgtagctgttcggtggcagcaggtagcgggttttcgcccacacctcgggctggtgctgcttgagccagagcatcttggtgaaaccgtagtagctgtccaccgagttgccggtcacctcgaacaggcgctccaggtccacatgctcgcgcacccaggccacttgctcgccggcgcggcggtccatccagatcaggcacgggtgcagcggtgtgagctgcgcatccaccgcaatccccgagccgccatacaggctgctgatgcacagcgccttgacctggtctttcgccacagcggccttggccatgcactgcgccacgcaggcctcgacggcgtccagccagacctgcggccattgttcggcccagcgcactttcggggtatccacgcgatacccctggctgtgctgggcgatgatcgtgccgtgaccatccaccagcagcgccttggtgctctgggttccgatgtcgacccccatcacgtaattcatgttcaaaccaccggcttcaacagcaccttgatcgacttggtcgagttggccaactcaaaggcttcggcccagtcgtccagcgggaagtcatgggtgacgatgcctttggaggtgaccaggccgcgctcgaacaggtcgatggcgatcgggtagcaatacgggccgaggtgcgcgccgcgtacgtccagttccttgcggtcgccgatgatcgaccagtcgacgctggtctcggcgccgaacacgctgaactcgacaaaacgcccgagcttgcggatcaggtccaggccctgggtgacgccggccggtacgccagtggtttcgatgtagacgtcgcagccgtagttgtcggtgaggccgttgatgatctcgcgggcgttgtcgcgggccgggttgatcaccacgtcggcgccaaattgcttcgccagttccaggcgctcgtcgaccatgtcgatcaccaccagtttcttcggggtcttcaacgcggcgacctggaccatgcacaggccgagcgtgccggcgccggcgatcaccaccacgtcatcgagctggatatcgccacggttgacggtgtggatcgagcaggccatcggctccaccagcgccgagtcttccagcgacaccgactcgggaatcttgtgcacgatggcagtcttggggatgcgcatgtactgggccatgccgccttcggccacttcacgctggaagccgaagatgttgtgcacttcgcacatccagtacttgccggacttgcagaagcggcacttgccacagggcacgatctgctcggcgatcaccttgtcgccgaccgcgacttcaaagtgctcggcggcgccctcgccgacttccaccacataaccgaaaaactcgtgccccggcaccaccggcgccttgacccaggggttgtcgccgccccagaacatcgcagcgcccgagtggcacttgcagtcactggcgcagatgccgcaggcggcgatgcggatcaccagttcattggcgcgggcctggggtttaccgatgcgttccaggcggtagtctttggggccgtggcagacgacggcttgcatgtcggtgtgcttgtccatggtgtcgagtcctgtgcttgttaggagtttatttgtggcgctgacggctgatgaaaatcgccagcaaaatgatcgcgcccttgatcacgctctggacgtagggcgacacgccaagcatgttcaggccgttgttcagcacgccaagcagcatggcgccgagcaaggtgccgacgatcaccccgcgcccgccggcaatcgatgccccgccgagtaccacggcggcaatcgcatccagctcgaacgacacgccggcattcggctggccgctcatcaggcgtgaggtgagtaccagcccggcaatcgctgcggtcaggccgctgatgccatacaccagcagcttgaagcgcgcggcacgcacgccggagaggcgcaccgcttcttcattgccgccgatggcgtagatgtagcggccgatgcgcgtgtgttgcagcagcacataggcggcggcgtaggtgatcagcatgatcaggatcggcacttcgatgccgaacaggctctggcgaccgaagaagccgaaccactccggcagcccggaaatcgggtagccgtcggtgtacatcaggcccaggccacgggcgatgcccatggtcgccagggtcacgatgatcggcggcatgtgcaggtaggcgacgaacaggccattgccgatgccgaaggccacgccgatcaacatccccgcgccaatcgccaggcccggcggcaggcccgcgaccatcaacccggcggtgagcgtgccggacaacgccatcaccggccccaccgacagatcgatgccgccggtgagaatcacgcaggtcatgcccaccgcgatgatcgcgttgatcgacacctggcgggcgatgttcgacaggttgctggcggtgaggaaggtgtcgctggcgaggatcatcaccagggtcaccaccaccagccccacgaacggatagaacgccggcgagcgcaccagccgcgccaggttcaggcgcagccggctgctgtcgacggtgttaatggacgtattcacttgagccccctgttgcatggcgcatgacctcttgaggattgacggcggacgcttcgaggaccttgacgatggcgcccttgtgaaacacggcgacgcggtcgcacatgccgatgacttccggcagctcggaggaaatcatgatgattgcgtagccctgttcggtgaggctgcgcatcagcgcgtagatctgcgccttggcccccacgtcgatgccacgggtgggttcgtcgaacaccagcacgtcgcagtggtggttgatccagcgggcgatcaccaccttctgctggttgccgccactgaggttgaacacccggctttcgccgctgggggccttgatcgacagctggcgcatcaggtcttcgacactggcgcattccctggccttgtcgatcaggcccgaggcgttctggtatttgggcaggttgttcagcgagatgttttcacgaatgctgaaatcggtgatcagcccttcgctcttgcggctttccggcagcaggccgatgccgtgggcgagcgcctgggccgggtcatccagggtaattttctcaccgcgtagccacacgtctttgctcaccgacggcagcgcgcccatcatgcccagggccagctcggtgcgaccggaaccgaccagaccggcaaagccgaggatctcgcccttgtgcagttggaagctgttgcgggggccgttgcgcaccagctgaatgtccttgacctccagcaacagcgggccgcgctcggtgttcggtttgggcggaaaactgcattccaggcggcgcccgaccatcatctcgaccaggcggtcgatatcgctgtcggccacgtcggtgacgcccacattgccgccgtcgcgcaacacgctgatgcggtcacacacctggaaaatctcctccaggtgatgggagatgaaaatcaccgccacgccctggcgcttgagctcgcgcatgatctcgaacagcagttcggcctcgctgggggtcagcgtcgcggtgggttcatccagcaccaacaggcgcgcatccagggccagggccttggcgatttcgacaaactgctgctcggccacgctcaggtgcttgaccgcacattgcaggtcgatggtcacgccgaggcgcttgaacaacgcctcgctggccgcgaccatttcgcgcttgcgcagcaggccgaagcggttgctcagctcgtggccgaggaagatattttccaccgccgtgaggtagggaatcaggctgaattcctggaacacgatgccaatgccggcggcgattgcatcgcggtaggtcgcgaactgccgggcctggccatcgatcaggatctggccttcgtcctgatgctcgacgccaccgaggatcttcatcagggtcgatttgcccgcgccattttcgccgagcaaggcatggatctcgccgcgctcgacctgcaggttgatggacttgagggcctgtacgcccgggtaccgcttacagatgttttccagcttcagaagactgctcataccgccgacctcgtattcagaaggagaccgcaagccccacggatggcgtggggcctgggtgatttaccagctgaaatccttggccttggcctggtcgatcaaggtgatgtccaccgggatggtggccggcacttgcgagccccacttcttggccagggcgatgcccagggcaaggcggatctggtcacgagggtattgcgccgaggtggcgatgaatttgctgccgggtttctggatcgccttgatcgcttccggcgcgccgtcgacgctgaccagtttcacgtccaggccgctggcttcgatggccgagagtgcgccgagggagccgttgtcattcacgctgaaaatgcccttgagggtgggctgggcctgcagcatattttcggtgacggtcagcgcctggtcacgttcctgcttgccgttctggatgctgacaatcttgatgtccgggtgcttggccacggcttctttgcaaccacgcacacgctccaggatcggcaccacggcaatgccgtcgaggatcgcgatattgcctttgtcgccgatgctcttggccaggtattcacaggcctggaagccagcgtcgaagtttttcgaaccgacaaaggaatccagcgggccgtccgcctgggcatcgaccgcaaccaccaccacgccggcggcgtgggcagacttgacggccgattgcacgccgaccgagtcggtggggttgatcagcaggatatcgatgcctttttgcagcatgtcttcgacgtcactgacttgcttggacacgtcatgacgggcgtcggtgatgatcagtttcgcgccgatggtcgccccggcttcttccagggcgtttttcatggtgacgaaataggggttgttgatttcctggaaggacgcgccgatgcggatcggcttggcggcgtcggcaaaagcgggggcagcggtaccgagggtgatgcttacagccaataaacacagggttttcgggagcattttcatggcgtggttctctgttttgtttttattgttagagcaaatgttatcgttaacattttgcgagaagctaacaaggaaattcgggtgacgcaaggggccactggtcggcttcggtcggaatgtgggagggggcttgcccccgatggcggagtgtcagttggcgatgtaagtgactgacctgccaccatcgggggcaagccccctcccacacgtgttcatgtgtgcaccacaaaacctcgcacaatcttgagtaccaactaagctcagcctccaacaaaaaagaccgagctgcctgccatggcccatcccaccgagacctttcgcgcccgttaccgcgcccaagtcgcgccccactacaacccctggctccacgccagtttcgtgttcggctacggcatcgcgtgcatcagcctggcctggtcatcgacgcaccagatcaccgcgctgcaatggctgaccgtgcccgcgacgctggtgttcttcaacctgtgtatctacttggtacaccgccacctcggccaccacaaacacgccctggcccgcctgttctatgcgcgccacaccggcgatcaccacagttttttcacccccggccacatgacctacgacagccctagggactggcgcgtcattctgtttccggcctggctgatcgtgctgcacagcctggcgatcaccctgcccgcctggtggctgctccagcagttgagccccaacgtcgccggattgttcgccgggtgcatgctcctcggatatttgctttacgaattgtttcacgcctgcgaacacctgcccgccgaccacccagtggcacggctgccgtggctgcgccagatgcaccagttgcataccctgcaccaccgccgtgagctgatgcaggggcacaatttcaatatcgtcctcccgctgatggattacttgttcggcaccctgtactgggagccgggcccccacgacaaccaggaatcgtcatgagtacccgtcccaaaaaactgcgtcatctgttgtttgtgctgtttctgctggtgatcgccttcttgctgttgatgcccaccaaagtgcaaccggtgaactggacaccgcccaagccgccgtcgctgaaggacggcccctacgccgaaaaccagcgcctcaagggcgtgcagaagatcggcgcgcaggacatcgccgggcccgaagccttgctgctggatgcccagggttatctgatcagtggcttgcatgacgggcgcatcatccgcaccgcacccgacagccgcagcctggaggtactggccaataccggcggtcggcccctgggaatagcgctgcacccggatgggcgcttgatcattgccgatggcatcaagggcctgctcgccctggatgcaaaccgccaactcactaccttgagcacgggagccaataacgtccccttcggtttcaccaatgacgtcaccgtggacgccagcgggcgttatgcctacttcagcgatgcatcgagccgctggggttatgggcaggacggcgaagcggtgatcgaacatggcggcgatggtcggctactgcgctatgacttcagcaacggcaccaccgaggtgctgctcgaccagctgcaattcgccaatggcgtggccctgggcccggatgaacattatgtactggtcaatgagaccggcgcctatcgcatcagccggtattggctcaagggcgaacgtgccggcagccatgacctgtttatcgacaacctgcccggcctgccggacaacctcagtttcaatggccaggaccgcttctgggtggcgctgtattcaccacgtaacccgctgctggacagcttcgccggctaccccatgctgcgcaaagtgatggtgcgggcgttgatggtggtgcccaagccgatcgagcgcaaagcctttgtgctggggttggatacgcaaggcaaggtgattgccaatttgcaggatggcagcgcgggcaactactcgcccattaccaccgctcgggaatacggcgagtggttgtacctgggctcgctgaagagtacgagcatggcgcgcctgccgttggcactggcgttggcgccctgacgcaaaaagggcatacaggcgctcggcctgtatgccctggtggttaccggttaaacacgcttagctcttggtactgctgagcagggtctgcttgcacaggtggccaaagctgacgaactggacattgtcaccgccgacgccaatacccggatattcgagcacttccatacgccatacgccgtagttgaagtcggtacgccaggtgtttttgtagccctgggcgtagtcgacaaaggtggtctggaagtcaccgaagcaggtacctacgttgatcgtgccccctgccagaccggcgctgttggtggccgccgaatagcctttgtagacaatagcgccggtgtccgggttgatgtgttggtcgaggtagacgatcgggtgcagccccaccaacggtgcgccggtgctgtccgacagccccatggtccagctcaggtcgcgataggcctgggtggtcatgtagccataccccacgttggacgcggaggaaggaatgcgcaacacgttgccttcgcctttcacatcagggttgttcacccgagggttggaaccgaaggacaggttgtatttgcccgtcgcgctccaaggctcattcggatgttggttcggacgaacacgcaccttgacnacncggcagccatgacctgtttatcgacaacctgcccggcctgccggacaacctcagtttcaatggccaggaccgcttctgggtggcgctgtattcaccacgtaacccgctgctggacagcttcgccggctaccccatgctgcgcaaagtgatggtgcgggcgttgatggtggtgcccaagccgatcgagcgcaaagcctttgtgctggggttggatacgcaaggcaaggtgattgccaatttgcaggatggcagcgcgggcaactactcgcccattaccaccgctcgggaatacggcgagtggttgtacctgggctcgctgaagagtacgagcatggcgcgcctgccgttggcactggcgttggcgccctgacgcaaaaagggcatacaggcgctcggcctgtatgccctggtggttaccggttaaacacgcttagctcttggtactgctgagcagggtctgcttgcacaggtggccaaagctgacgaactggacattgtcaccgccgacgccaatacccggatattcgagcacttccatacgccatacgccgtagttgaagtcggtacgccaggtgtttttgtagccctgggcgtagtcgacaaaggtggtctggaagtcaccgaagcaggtacctacgttgatcgtgccccctgccagaccggcgctgttggtggccgccgaatagcctttgtagacaatagcgccggtgtccgggttgatgtgttggtcgaggtagacgatcgggtgcagccccaccaacggtgcgccggtgctgtccgacagccccatggtccagctcaggtcgcgataggcctgggtggtcatgtagccataccccacgttggacgcggaggaaggaatgcgcaacacgttgccttcgcctttcacatcagggttgttcacccgagggttggaaccgaaggacaggttgtatttgcccgtcgcgctccaaggctcattcggatgttggttcggacgaacacgcaccttgaccaccccgccgacacccgggttcgggatcgacgtcgacacgacattcgcgcccacggtgacccactggctgccatcgaaacgctcaaggatccacttgttgcgcgtgctaccactggccgcgtcggccgtcagcgcgatgcctacgctctggccacggaccgccgtgaaatcaaagtagtcgacgtcgttgaggctgtcggcgttgcctttgatgtagttcagggtatccggcagttgaaacgccgtgtcgggcgtgtcattgggctcataggcatcgatattggcatccaccgccacaccgaactggaagctggaacccggcaccgctgcgttggcttccatgaaccagtagtagtcaccggcaggcaccacaccgctcaggctttcatcgcccgtgcctgggttattggaggtgcccagcgggagcggattgccttgaccatcgtcctggaacagggtcaacgacatgtcggtgcctgcggtctggccgaccagcaacgcgttgatgcgcgccttctgtggcaggttgaagtggtagcacagcaggtcaccggtctgcacgccattgagggtgtacaactggttcacgtccagcgtggtttcgcagccctggaccagtgccgcctgcacggcggccgctgcctgggcatcggctttcctgacctgggtcaccggcgccggcgcggcgtgatcttccaccaccgaatcggcctgggccttggcggcgaacgccggttttttcagttgagcgcccgctttgagttgctgcttgagcgtcgcaggggccttggtggccggtactttaccggcggccttgaggctttgcttgatgtcagtttgaacggcttgggcagccaggtgagggtattgctcggccagggcgaaggccgaaacgaagcaggaggccgccatggccgcgcccagcataaaggcttttttcgatttcattttttatccatccatagttaaaaagtgaagctcaggtgacgtccggtcacctgggatggaatgtaggatatgactggatggatgtacagtattttttgaaagaatttcaatttctatggaatggggatgtcacaccaccagcgccagaagctccagacagctgtcccgaaggcccagatatagccaactttataaggccacacaatccaacgcttgagcgccacaggaactgacgctaattcagcctccgtcacaatgccggcttccacatggcgctttgagtctgagaagaactcggaaataagcaacatgcgatattgcctgtcgatccactggtttcgcttccaaaatcgcttattgtcttggaccctttcgttctgacggaaataactttccacctcatcgagctttgcatattccgcaaaaatcatcagtcccaagacaacaaacgtcccgacaaacaacacgatggagtagatgagaaaaaaattcatggttaggctccctcgggtaggaatatcaaatccccatcgacttccatgatctctcctcccaaaaacgccccagcactaccgaccccctcacctcccacataccctcccgctgagcctccgataattccgcaggcgagttcacctgttcccttcatgcgaatgcctaggaacattgtgcatgccctacgagcggctcctgcgccgattcttcccaaaaaggcagctcctgagactccccccgccaacctccccgtctccacatacttcgcccgtctacactgcacctcccgcccctccacacacgcctccttgatctccaaccccgccactcccacatccagcgccaaccccacataagtccctttacccaaccacttcgacatctgcgcaatctcccgcatccgcttcgcatacccggcgatctcacctttatgcagatagctcttggtcgataggcccaatacctttttcagcgactcattgccctgcaaccccgtccccaaccgtgccgcaccgtgcagttgcacctccaaccgccggaacaacccctggcgctgttgaataaacgccgtcctgtccaacgcaccgtccttcaaccgctgatgcaaccgctcgatctcctccagcgtctgcgccacttcatccaagtgccgcgcccaggccgacgtcgcgctgccgatgccaatcgagcccttcgccatgaaactctgcagcaagtcatagttgtcgatcaccgtcgtgccggccgcagcacttcccttcagatggcggcgtacctcctcggcatgccgcatcaaccaggcctcctcgaccgagcaattcacgctgtggctgtcgggaataatcaccagttgccccggcgccaccaggccggggcgcaggtgccggttcaacacatcaaaatgagcggagcgctggcggctgggggcaccgcccatcagtcggtttttcaagctctgatagtccgttacgcggttgttgataaaactttgcgccatgcctcacatcctgtgagcagtgaagatggcgtcgaaatataagcaagcacctgcgccccggacacacgtccaggggggggcgatttacatttgggaagctgcctacgcagcatagaaatacagcctacggaaacaaccctaatacccagtcatttccaggtaacccaccccaccctcgaactgcaccgggccttcccagtacgggatactcaggttcatccaggcattcgggttgaccgcttgcgtggtgatatccagctgcttgccggggattttcagcgaccagcgagtggggatcttgcgcccttcaatagtcgtcgtatccagaggcgtcagttggatatctgcgttgtgcagggtttgtgtatggccctcgcgatcaatccaggtgccggtcaggtaggacgtgccatcggtttgccgtacacgaaacagcatcaattgctcgccccggtccaggtgcagggaaaaccagtcccagccggtctggctggcggtcagcggttggctgctccattcgcggtcgagccaggccgggccgctgacttgatacaccctgccgtcaatgctgacgctgccacgggcactgaaaaatggctggctgtagtagtacgaagcctggccctggtcggattttcggctgtagccgtggtcgccctgcagcaccaatggacggctggacgtcaggtgcaggtcgtaggcgaattgcgcaccgctagccttgagttgcatgtccgccagagggctctctgcaccagggcgggtggcgaaattccagtcgtcgatccaggcattgaacggcactgcctgagctccggcctggccgacgccgccgcgtgcgtaacgttcggcagcgtaatggcgggtggcggacgtaacggcggcgtggccgagccacacggtggagtcgtgccagcccgcttgcactggcccggccttgagcgcgttgcgaaacagcgtccactgcacgccgaagacattgccttgcgcgtccttgaggttggcggtgacgtaccaccattcgatacgaaagcccgcatgggggccgtggtcctcggggaagctgaacaccttgcccggcaccacctgggcaaagtccgccgcgtcgctgcccagaccggcaaagctctcctgcggcgcgggtactttgtcgcaagcggccagcagcaaacacgccaacaacaggggcttaatcttcattggcaaacgtcctcaacaaatccgcaggacggctgcggtacaactgccacaacggccaggccgacgccagcaaggtcgccagcatcgccagcccgagcaattgcgccagctgccacgggaacacctgcagcggcaggcgccagccaaacgcctgcacgttgatcactgcatccaggcaccaggccaacagcaggccgagcggtaccgccaggaccaatgtgagcaccgccagcagccaggtctggccgaggttgagcagcatcaattgccgacgcgtgacgcccaatgcccacagcggtgcaagctggcccaggcggctctggctctgggtcaacaggctgatgaacaatgccacgccggccacacccaaggtcaggctgttcagcgcggcagtggcggcgaaggtgcgctcgaacacctggctcgaccagcccttgagttgctgctgatcgacgatacggctgtcgtccagagcaaaggcgcgttgcacctcacgtaccagcggcgccacgtccggcggcgagacccgtaggttgaaacgcgccggtgacagcgtcggccagtgcgccagcagatgttgtgaattgaccagcacatgccccttggggttgccgtagtcggcgtaaacccccaccaccttcggcgaccacacaccttgaggcgtggggatgttcacggcatcgcccagcttcaccccgagccggcgcgccagttgctcgctgagcatcaaggtgtcgcccttctgcaactggtcccagggttcgctcgtggcctccagcagcggccaatgctggcggtaggtgggatcatcgaccacaccaaacaggtccgccggccagccctgcacttgcacggcgacctgccaggtgggcagcacggtctgcaccaacggctgttgcaccagccaggtgccgagttgttcggcctgggcaggggtttgtgggttgagatacagctcggcggtcagacgttgctccagccagttgttgaaggtatgccgaaaacccgaggtcatggagcccgcgccgatgtttgcggccagcgccaagagcaacgccatcagggccaggctcaaggccggcaactgctggcggcagtcggcgagaaaccactggccgagcaccgaacggctacgccccaacacggccttgagcaggccgttgagcagcaccggcaaaccgagcgccgcacccagcagcaaggcggccatcagcacaaacccggcagccaggctattgcccagccacagcgccagcaaggcgatcagcaaggcggcgccagccacccacgcttgacggcgcaaccaacgcccgtgggcttcatgccaagcctgggcattggccagcgccagcaagggcaggcgcgctgcccgccacaggctactggcaccggcgagcagcgcaccgatcaggctcaagcccagccctgcgccccaccaccaggggctgaggctcaactgccccgggacttcggcgccatacaaaccacgcaggctggcggccacatcgggcaataacagactggccagcaagtagccactggcgacgcccagcacacctcccagcaacgagagcacgcccagctccacactcaggctcacaatcagcatgcgcacgctgaccccacaagcgcgcaacgtacgcagcaacccgcgccgttgctccagggccaggccgatggcggcatgcacaatgaacagccccaccacaaaggacaggaagcccagcgcgtcgaggttcaggtgaaagctctcggtaaggcgtgcgaggttgttgtcctcgccttgcttgagctgcaacccggcgggcggcgtgggctggctggcggcgaatgccttgtccaccagcaggcgcgacaggcgctcgggcatctccagcacaggctgggcaaacccgatgtcggtgagcaacaggccgggcgccatgtctggttgggcttgcaatggcggcagtgtgcggccgcccacggtggtcggttgctggccttcgcgcagtcccaaggcctgcaaggtctgcggcgcgatccaggtacgccccggcggatcaaagaaggcgagcatctgcgcctggctcaagcgctgccccgccacggcgccgctgccgggcaacgacaacgggtcgatgcccatcaactgcaggcgtacctcttccaggcccttgagctgcactcgcccctgcaccaccggcgagaccggccacccggcgcggcgcaattgggcgaagatcgcctgggggaaactcgccccgtccggcgcaccgaggctggcctggggttcaccgccgatcaattggctggcacgggcatagctgtcacgcgcctggctgttgagggcttgcacgccgatcaacagtgcggtggccagccaaaggccggtgagcacgctgaaaaactgcacaggatgccgtcgccagtggctgagcaatgcgcgcaaggtccactgaaataccgccatctcaggcggcgcctgcggcgagaacgcgcccacgctgcaacaccacctggcggtccagccgtgcagcgatgcgcgggctgtgggtgaccatcaacaggctggtggggctgtcgcgcaagaggtccagcaacagttgcagcacttcgtcgctggtcgcctcgtccaggttgccggtgggctcgtcggccaacaacaggcccgggcgtgatgccaatgcgcgccccaccgccacccgttgctgctggccgccggagagctgttccgggtagcgcttgagcaaatcccccaggcccaggcgctcgaccagctgcgcctgccactgggggtcaaagcgtcccgccagccgcgcctggaacgccaggttgtcctcgacccgcaagctgccgatcaggttgaactgctgaaacaccaggccgatttcggtacgccgccaatgggccagttgcgcttcgctcagttgatccaggcgctgctcgcccacctgaatgctgccgccatccacacggtcgagcccggccaccaagtgcagcaaggtgctcttgccgctgcccgactcgcccatcagcgccaggctgctgcgctggcccaggtgcagatcgacaccggccagcaccgccaacggcccctggggggtggcatagcttttgatcacaccttgcacctgcaacatgacaacactcgtttgatgggcggccatcgagaataacggctgccgaccaaggccacgcaaatttttcacatcgatttcaccagctgcccacccgtgcctcattaaattacccaccaagcctcacttgccggcaacttgttagttgtcctttttcacaactttttacatgcaaggtgttcagcgaaaagacagccgtcgtgtgacagcctctggtcccactaaggacattcgctaaaacgttgcgcctaattaatacaagactgccaacaatgcccatggtgaatgaagtggttgaccttaccctgaccaaaccgcgctcgccccgggactttttcaagcgtttgcaacgactctggctgggacttgcggtggttggcctgctgctggtgtgcagcctgttctggccggcgtcgccacgggacctgggcatcggcaaccgcctgctgacctcgcaagtgatgccgctgtggcgcgacggcgacctgatcgtactggtgcgccatgaggagcgttgcgatcgctccgccaacccgtgcctgggcccgatggaaggcctcacggtacacggcagccaacaggccgaaaagctcggcaacgcctttaaatccatggggatggacaccagcgatgtgctcgccagtcccgctatccgcacggcgcagaccctgcgtttcatgttcgacaaaaacgagctgacctcgggccaacaggccatctgcggcacggccatgggcgaggaattgctcagtcaaaagacccccggacgcaatctggtgttcgttacccacagcggttgcatcgccgacttcgaaaaaacccagggcttcccccatgccgcgttccccgaatacggcagcgcgttgttcgtgcaggcattgcccaacggcaagttgaagatcctgggcatcgtcaacaatccggattggcctgccgcgctaaaacagacccactaacttactccccgccctgttcagcaaaaagacagccctgttctggcatgtttagttgcgccttttaactaaggacgtcatgaatattttctgcaattgtgtgaacgctgtgattttttccactattacttcatcacttgaaacccacatctcagagcgtcagggagcgacgtttgcatgacccgactaaaacccctgccggtattactgctggccttcgttgcgttttacctgctgcccctgggcctgcatggtttgtggatcccggacgaaacccgctacgcccagatcagccaggagatgcttcaaaccggcaactgggtggcgccgcatttcatgggcatccgctatttcgaaaaacccgccggcggctactggttgattgccctgggccaggcggtgttcggccaaaacctgttcggcgtgcgcatcgcctcggcgctgaccaccggcttgagtgtgctgctggcctacttgatcgcccgtcgcctgtggaatgacccgcgcaaaagcttcgcctgtgccctgctctacctgagcttcggcctggtggccgggcaggcggggtattccaacctcgacccgcaattcaccttctgggtcaacctgagcctggtggcgctgtggtttgccctcgatagtgccacgctgcgcggccgcctctgggcctgggtcgtcgtgggcctggcctgcgccatggggttcatgaccaagggctttttggccttggcgctgccggtgctgattgccgtgccgtacatgctctggcagcgtcgcctgggtgagttgctgcgctatggcccgttggcgatggtggtcgcagtactggtgtgcctgccatgggcgctggccatccatcttcaggaaccggacttctggcgcttctttttctggaatgaacacattcgccgcttcagcgccgacaacgcgcagcatgtgcggccgtggtggttcttcctgccgatcatcgccgtgtccagcctgccgtgggccggtctgctgccaacgactctgcgcaagacctggcaggaaaaacgccagccggcgatcaccttcctggcgttgtggctgcttctgcccctgggcctgttcagcttgagccgaggcaagctgccgacctacatcatgccgtgcctgctgcccctggcactgctgatgggccatacgatgatcgacctggtcaagcagggcaaagcccgcacgatctgcctcaatggcctgttcaacttcgtgatcggcatggcggccatgatcggcctgatctacctgcaaatcgcccggccgctgtacagcaacagccacgccgagatgttcagcttgtccctggccttcatcgtgctgctggtgtggattctcaccaacctgctgcaagtgattcgcccactgacgctgtgggcaatgcctgcactgggcatcggcctgctggtgatcctgttgccggcgagcatgccgtcgtggattgccgacaacgaaatgcccgaccagtttgtgcttgaacacctggaagaactgcaacagacccaggcactgctgagcaatgaactggggagtgccagcgccctggcctggcgcctgaaacgaccagaagtatcgctgtatgacaccgagggcgaactgcgctacggcttgcaatacgcgggctcggtgcatcgcaaagtggaactggacggggtccaggcctggctcaaggaggcgcgccagcacggctcggtgggcgtgctgctgcgggtcaacagcaccagtgaaatgcgcgaagccgggcaactgccgccaggcggcaaacgctactacaagggttatctcgaattgatcatctacccgagcctgccctgatgacacccttctggaagaccgaacgcggcgccctgctgctgttgctgggcgtcaccgcgctgttgctgctcaccggcctcggcgcacgcgacctgtggggcccggagacccgctgggcgaacatcgccttgcagatgctacagagcggggactacttcgacccctacctcaagggcaccccctattacgacaagcctctgccctcctactggctgatcaccgccacggcccacctgatgggcggcctcgggccgtggtcactgcgcttgccctcggtgatcggtgcgtggctgagtgtgtggctggtctacctgctcggtgagcaactgatgcgcaagggcaccgggctgatcgccggctggatgctcgccaccaccttttactttctgttctgggcgcgggtggccacggcggatgtgctgacggtgtgcggcgtgctggcggccgtctggtggtactggcgcgggccggacgacacccggctgggtcgctacaccgtgttcttcctgttgctggccgtgacctcgctgttcaagggcttgatcggttttgtgctgccgggcctggtcctgctgccgcacctgctcggcgagcagcgctacaagcgccatctcaacctgcgcttgctacttgcgctgctaatcgccgccgcggtatatgccgtgccgttcgtgctctcgcatatctacggtgcgcccacctatgggcaaagcggcctggcgctggtgttccgcgaaaacgtggtgcgtttcttcgacccgttcgatcacatgggaccgatctacacctacctgatttacctgcccgcctacaccctgccgtggctgccgtgctggctgctcggcctgtggctggcgctgcggcactggcgccagaccccgcccaacgtgcgatggctggtgtggggcctgggcctgttgtttgtgttcttcaccgccagtggcagccggcgcagctactacgtgttgccgctggtgcccttcgcccagttgctcggcgcctggtggctcagcgaacgcctgcaggccaggcccgccagccggccgcgctggtacaaagggttcgcctgcgccgccgtgttgatgctgctggtcattggcgtggcctacccatggagcaacggcaatggcggcgtcacccgcttggccgaggatgtgcgcagcgaagcggtcaaacgcgcgccgtgggagcaatggcaactggtgctggtggaagtggacaacaaggtgccgatgtacctgcaaaacggtggcaagccgttctactacgtggccgagacccaggacttcccgcgccagggcgacagcgcagcgttcatggcctggttgcagaaaaccagcggcaaggccttcgacccgcagcgcacgatcatcgtcgcgcagtattccaaggacgacctgacgccgttggcgtacctgggcgcggatcaccaggtcatcaccacccagccggacaatggcgagcgtttgtttcaaaaacgtgagggtggcagcgtggcgttcgttccctggtccaaatagacggcggtcttatcccttcaggctggcggcatggataaatgcctcatccaggctttgggcgtcgtacgcgtccatgaagccttgcgcgtcagtgaaccggttgaatcgcctttggctcagcatataaaaatcatcgcaatgcgcgacgatctcatcgacgttatgtgatgaaaccaagaccgcgacaccctctgccgcagccccctccagacagcgccaaatgtgataacgaaactccggatccacacccgcagtgggctcatccagtatcaccaggtccgcgttggcacaaagcaacgacaacgtaaaaaaccagcgtttctctccatagctgcagagcgcagattttttgttccagatctcgcagtaccgctcggcgatgccggggctccatttttcgattttatcgagtgcatgttgttgggtgacctgggtgtcggagcaaaacagcatggccattttgaagatgtcgaacatgcgaaatacagggggtgtgctgatgacctgcgacaggtacagcagcttggagaaggagctgcttatttcaccaccctccactttcttcaggccgcacagtacgtcaaaaaacgtcgttttaccggagccgtttgggccgagaaggcctgatatggagccggccatggctgtcagagaagccttgctgaacactacatggcctgggtaactgaccccgagtgagctgacgataagtttcttcattagtatcggctccagactgggtttatgagcaataaccgaaaggtcacgccaaaggaaatagaaaaggccaccatgacaaccagcatgacttctatcgatcccacgaccccctctagcattatttgattagcccatctcattggatttaacagcttgatgacttcgagggcagtatgagatgtactggcactgacaattccaagcgccaacatcaaacacaacaagacagaaaaaacagtactggcattttgaaaacttaatggagccaatgtaagcaacagcgaaaatatagagaacaagagaaagcagatataaaatctcgacgcaacatcccacacctccgacacttccactcccgccccaaaataaagtttcgtcagaccgtagaaaaccatgcagtaaactatcgacaagatggaacaagcaaaaaactgcccaaacagaaagaccagcttagtcggtttagcgtagacaaatgaacgcaagaagccactttctctgcgcccgacgatataaaacgccaggccgaaaaacgctacgctacaggcaataaaggcatagaaccaagatgtaacggctagataattgatcgtccgatcgtcatcgggcgtcctcgcataggtgatcaaatagaacgtcaccgcgggagaaactaccatccagaacagtgcaaccggttccttcaactgttccttgataaacaatgctgccagtaaaaagggtttggacaatagataaccgctcatgacttacctcgcaggaagcgtgaccgactctccatcaaaacttagcgtatctggaagaacattcaagatagcctacttttaacaggctcatgaacatgagaaatttcactcataaaaatcagacattcaataattgcatacgacgatttttttcgacccctcccacagcacatcaaaaccctcaacaagattagtaacttactgaacacactacaaaaacaatcagatgccttattacttaacatataccgaactgttgtaattttttttcagaaaaaaacgacaagcggcattgatctgcgatgcgccccctttggtctcgtagcagtaggcatcactcactgcgccatacacccgcaatcaagtatccggattgatcctgcttttgcgctccgcatcggcctcgcccgtgtccatccgcaaacccgccacctgcgcctgcaccgcccgcccctccgcccggttgcggatgaaaccggcccgggtgaaccgttccagaaacggcaccggcaaggctttgtcggcggttaccgcaggttgttcagccacatcgccaaacaaggtgtacgccgcactcggcaagtgccgggtgttgaggtcgctggtcagtcggcccgcttgcaggacgatagcgcggttggtcacccgttgcaggtcagacaagcgttgggaaatatagaggatcgccacgccccgggcgcgctggctgtcgatcaggccgagcaggcgttcggcgtcggtttccgacagggcggcggtgggttcgtcgaggatcagcaacctgggttgcagggcaaaggcccgggccagtaccagcagttggcgctcggcctggccaaggcgttccaccgggtgttgcagcggcaggtccaggcccagcccggcggcgatggcttcggcgcgttgcagcaggcttttgcggttgagcagaaaatccgcatcgggttgacccagttcatccagcaacaggttctcggccacactcaggccaggggcgatggcgtcgtcggggtcttggtgcaccgccacgatgccaacccgccgcgccgacaacggcgaggcaaagcgttggcgctgcccatcgacccacacctcaccggcatccgccgccaggctgccgctgaggatcttcaccagcgtcgacttgcccgcccccgtggcaccgagcaacgccacgccctcgcccgggtaaatatccaggctgacctgatccagcgcccgttgggcaccaaaggtcttgcacaggcccagcaggcggatcaggggctcgggggcaaccgggttgctcatggctaatctctaaggcggaacgatgactcattacaacgtgcgaacacgctgatttattccgaacaacaatgagttaggccccggattaaatgcattacctcaagaacaatccaatagctgaatcgcatagccaaatttttttgagttataaggcagttatttgcagcttgaggaatgcgttcagcaaagcaaccctgtggaccacagggacggcaacggcatcgttgagcgggacggctagtggcatttggtcatgctttgtaaagggccagcaaggcgtgtcgcttttaattgcaggacgtttcctagacaatctccgccgccttgtgcctgccggaatcggtggctagtctgcggtccgtcactggttttcagtgatcgggtttagtcgcccggaatgacacaaggcgcatggtcacatgaagttttatggtggctgtgcgcagggcaccttcgggtgcgccggatttccttgtggccggtcgactaacctgcgtacagccgccacccatcgtttagtcgcgccaggtgttggctcctattcacacaaggaactacaccatgaacaaagccctacccgacccaccgcaagacctcaccaaagaccgcgccgccttcaaccgcgccattgaccattacctgccgtcacaggggctccacgccctccacgaagacctgagcttcgaagacgccctgctctacaccgccagtttgctcgacagcgcatccactaccgcgctggattgtggcgagacactgagcaaccccgaacgggcgagaatcctggcggtctggcatttgctggagatcgccaaggcgacagtagatcgctccatcgagtgcctgaaacctgcgcctgcgactgcctgaacacggtcctacaaagcagcttacctatgtgcgtgagctgacttggtgagtcatcccgacaagagtgctttggttgctttcgactgggcaggcattctgtggcgagcgggcttgccccgcgttggagtgcgtagcgctcccagcttttttggggctgctacgcaacccaacgcgggacaagcccgctcgccacagttgcagtgttcgcccttgatggaatggtatcagccagatacttgaaagggctggccataagggcgtaaccctaagcagcggttacctaaataacggatatgcccccgtcaaatccgccgccgccgccccaactgcggaatagccgcctgaggcacctccacccgctgaacctgcgtcaacacacaccccgccaattgcgccaccgtcggatgactgaacaacgcccgcgcatccacctccacccccgccttgcgcatccgcgccaccaggttcaccgccaacaacgaatgcccccccagctcaaagaaatgatcgtgccgccccacccgctccaacttcagcacctcagcccagatcccggccatcaacacctccaccgccccgaccggcgccgcataggcgcggctcaccaccgcccccaaccccggctccggcaacgccttgcggtcaagtttgcccgccggattgagcggcaacgcgtcaagctgcacaaacgccgccggcaccatgtattccggtaattgctccagcacatgggcgcgcaacgcatccgggctcggcgcctcgccacgcacggtgaaatacgccaccaggcgttcatcgcgaatcaataccgccacctctcgcaacgccggatgcaccagcagccgtgactcgatctcccccagctccaggcgcacaccgcgaagtttgacctggaagtcgttacgcccgaggaactccagattgccgtcaggcaggtaacgcaccaggtcgccagtgcgatacagccgatcaccggccacgaacgggctgtcgataaagcgctcggcggtcatctgctccagccccaggtaaccccgggccacgccgacgccaccgatatgcaactgaccgctcacgcccatcggcaccggcgcatcgtgttcatccagcacatacaggcgtgtgttgttgatcgcccgcccaatcggcaactgcaatgccggcaccggcgcgccgggttccagggtccaggcgctgctgtccactgtggcttcagtgggaccgtagacgttatgcaggcgcaccttgggcaagcgcgcctgcacgccacgggccagggcttcggtgagttcgccgccgccgcacaacacatcggtgaggctgctgcacagcgcggactcttccagctcaaggaactgctgcaacatcgccggcacgaacttgatcaccgtgatctgctgctcacgtatcacctgcgccaggtaggccggttcgcgatggccgtcgggccgtgccagcaccaggcgcatgccgttggtgagcggccagaacagctcccacaccgaaccgtcgaagctgaacggtgcccgctgcaacagcgcgccgccctcggcattggggcacagctgcgagccccagtgcatcaggttgccgaggccacggtgttcgatcatcacgcccttgggtgtgccggtggagccggaggtgtacatcacataggccaggttggccacgctcagccccggcaccaacgggttgccgacaggtgcctggctccaggcgcagtggtcgaagtcgatcaccgggatcgacacgtcacccggcacgtcacgggtggcggcatgtaccagcagcgccaccggctggctgtcgtggagcatgtaggccaggcgctcgcgcgggtagcccggatccagcggcacataggcaccgccggccttgaggatggccaacaggcccaccaccagctccagcccgcgttcgacgcacagcgcgacgcgggcgtccggttgcacaccgcgctcacgcaggtggaaggccagttggttggcgcgttcattgagttcgcggtaggtcagttgcaactcgccggcctgcacggcgatggcatgggggatatgccgtgcgtgggcttcgaaccgcgcctgcaccgtgaaagtgtcggggtagtcggtgtcggtagcgttgaagtccaccagcagggttttcagctcgccggcgggcagtacctggacgtcgcgcaacggtgtctgtggcgcctggtccagcgtgtccgccaagttgatcagtgtgttttcaaggtagtcgagcagccgaccggcgccaatttgctgcggcgccttggccttgatccggaaacccttggccgtgtcgtccacggtcagcatcagcgggtagctgaggatgtcctcactgctgagcaaggcaatgcccggcaccagggtcaggtcacgctcggcgtcggtgtgccggtagttgagcaggctgttgaacaacggcgacgcgccgctgcaacgctgggccagcgcaagggaggcttgttcatggacgagcaaggcgctgagccgggcgtgggtgcaagtgagcgcatccgccaccgttcgcccggccaggcgcacccgcagcggcagggtgttgatgaacatgcccagggcgcggtcggcgccctcgcccgcctgcaaacggccgagcagcacggtaccgaagaccacgtcatcacggccggcgacacggctgagcacctgcgcccaggccaggtggaacaggctggcggtgctcacacccacgccacgcgccagggcacgcaaacgctgattgaggctgtcactcaagccacgttcggcttgttcggtgtgcgcccgatccgcctggcgctcctgtagaccgaaggccagggtcggctcgtcgacatcccccaactgctcgcgaaagaacgcctcgtgcgccgcttgacgtgccggcgaacgggcttgcaccaccacattgcgatacggcaccggcaccggcaactgcgcctgctggccgagcaagtgggcgcggatttcctgcatcaggatcgtggtggaggtggcgtcattgaccaggtgatggaaccgcagccgcgccacccaacgcgagtgctgcggctcttcggcatagtccagggccatcagcggcgcctggcgcaaatccagcggcgcgcacgcttcgcccagcggttcgacgcgcaattgcgcctggcgccacaccacctgcatcggttgctccagggcctcccacaccaggctggtgcgcaggatgtcgtggcggttgatcacctgttgcagggcctgggcaaatgcgtccaactgctcgcgctgcgcaaagctgaacagcgcctgttgctgataaggatcgcgttcatcggtgatgtggtggtagagcaagccttcctgcaacggcgccagcgggtagatgtcctgcacattggccgcgccgccggggatgcgcgcgacgataggcgccaggctggcggggtcgagttcggccagctccggcgcgtccacgtcactgagttcactcgccgccgccagggccgccagggtcggctggccgaacagcacctggacatcggcgcgcagcccgacctggcgcatgcgttgcaccaattgcacggccagcaatgaatgcccgcccagttcgaagaagtggtcgtggcgcccgacctgctgcacctgcaacagctcggcccagatctgcgcgagtacgctttccgcgccggcgtgcggtgcttcgtacaggcgggtgacgaatgcgtcttgggtgggtgtgggcagcgccttgcgatccagcttgccgttggcggtcagaggcaacacgtccagctgtacgtaggcggccggcagcatgtagtcgggcagcgacgcttgcaggtgggcgcgcagggcttcgatcggcaccgcttcacgcgggacgaaccaggccagcaactgcccttcgcgggcttgcaccacggcgtcctgaatgtgcgggtgagtggccaaggccgattcgatttcgcccagttcaatgcgcacgccacggattttcacctggtcgtcattgcgccccaggtattcaaggttgccgtccggcagccagcgcaccaggtcgccggtgcggtacatgcgcccttgggtgaaggggtcgtcgaggaaacgctcggcactgaggtcgggacgcttgagatacccgcgcgcgatgccgttgccgcccacgtacaactcccctgccacgccgatgggcagcggctgttgctgcgcgtccagcacgtacaccgtggcattgccgatgggtgcgccgatatgcaatggccggccgacagccatggggccagaggtggcgaccaccgtggcttcggtagggccatagttgttgatcacagcgaaggactgcgcctgggtgaacgcgcgcaagcggtcgccgccgatcagcagggtgcgcagtgtcgggtggtgcaggccctggctgaaggcgtactcggccacgggcgtcggcaggaagcacacgtccagcggctgcgcctgccaccaaccgagcagcgcgtcgatgtcttcggcgccgtcatgggccggcggcaggtgcagcgtggcgcccacgcacaacgccggccagacctcccaggccatcgcgtcaaaaccaaaaccggcaacgctggcggtgtggctgccggcatgcaggtcgaaggcccggcagtgccagtccaccaggttcgagacgctgtggtgctcgaccattacacccttgggcaaaccggtggagcccgaggtgtagatcacataggcgaggtgggaggggctgaccgctacgcgggggttggtgcccaggtggaaggtcgggcggtcaagctgaatcaccggcaccgtcaagggcggcaaccgatgcagcaaatcgtgctgggtcagcaccactaccgggtcgctgtcgtgcagcaagtaattcaggcgctcggcgggatgggccgggtccaccggcacgtagcaggcgccagacttgaggaccgccagcaaccccaccaacgtgtccagcccacgccgcgccaggatcaccacccggtcgtccggccgcacgccgctctccagcagttgatgggccagcgcgttggcctgctggttgagttgggcgtagctcaggtgccgcccctgatacaccgccgccacggcgtccggcgcgcgcgcagcctgggcttcgatgcgcgcgtgtagggtctgcggcggcgtgacgggctgggtggtggcgttccattgttgcaaccgcgcctgttcggcgggtgtcaccagggagaaatcgcggatcgtcagcgcggtgtctgccagcccctgctccagcagccaggtaaaacgttgcgccagggccgccacttcatcgtgctggaagtacgcctcgttgtagacgcaatgcaggcacgcggtgtcctggtagcgattgctgcgcaggtggatggccagcggcagcggctcgtggtggttggacaccttgactgcacgggccactgttgtgccgtagcgcagttcatggtcgtcctgctcgaaggacaccgacaggtcgaacagctggccgcggtcgctgcgacgcaggcccagctcgcggttcatctcgctcagagggaaacgctggtggcggaaatcctgcttgagctggtcgcgcaccccacgcaccaacgcgctgaacggcaactgctcatcaaactgcaagcgcacggcactgacctgggtgaacagcccaacggtggagcggaaccgcgcattggaacggttgagaatcggcaaccccacgacccactcctggcgttgggcggtgcgggtgaaatacacatacagcgccgccagcagcacatgaaacgccgacgcctggtaacggttggccacctgttccatgcggttgagcagtgccaccggaaacgcctgcgccagggtattgctcgtggccttggccgtgtgtcgcggggtcaacagcggctcgggaatcagccggtacttgcccagccaataggcgcggtcgcgggcataacgggcggacgcgtggtagtgctggtctgcgtcgataaagtcgatgtaggacggcgccggcgactccgcttgccggccttgcaccagggcggtgtacagctgcgcgagggattgcagcatctggccgaagccccagccgtcgaggatcaggtggtgggcctgggtgccgaggcgatagtggtcgtcgtcgagcttgaccaggaaaaagcggaacagcggcgcgccctgcatcgcataaggccgggccatttgcgcctgcatcagggcgtggctcgcggcctgcggatcagcacaagctgacacgtcatgccgcgccagttccacagccaacgtcgcagcgaaagtctggcgaggcaggccgtcggcgtcgctgtgcagttgggtgcgcaacgcgtcgtgcctggcgaccagaagttcgacagcgcgctgcatcaggccggggtcgatggcgccggcaaagtccacataaccaccgatgttgtacagcggcgagtcgcctgcgcgcagttggtcgagccagatgtcctgctgggcggcggtgagggggaagctgggtgaatgcttcataagatccttctcatggaggtcaggcactggccgcgcaggggtgcccattacgacgaatgggccggattggagcatgggggccaggggctgtctgtcaccctaaacccggacattcaaatggatagaccaggcttggctgatggttcactgctgaaacgattaaagagttgtaggacattggctatatttggccgatgccggtttgaattgaacatttcaaaaaatatatttttatcttatttatcatagagttaattaaccctaaaaaatccgcttggtgactcgtagtcggaattacctctcagaaacgtcgaattaatgacgcggtttctatggcaggttgtgtccctcgtttccgctacatacgtaggacaaatccactggctaaatacactttcgaataccgactctggtgtgtgagcaacggatcgcccccgcagaggcccagagcgtctgtacacggttttcgatatcaaggatgagaaggctatgagtttgaccagcagtattgccaacacccaaagcccgcatttctacgctgaaatgggcgagttgattgccagcagtggccacccgggctttgccgcccacatgctgcacctggtggacaagtgggtgccgatccacctggtggatctgagcgaatggaccctcgacgagctgcgcgaccgtgtgctcgatatcacgctgctgggcagcgccggccagacgcaggacctgccgcctctggccctgaattccatggacgaccacccgctgctgcgtgagatgctcggcatgcaggacccgctgctcatacagttgaaggccaaggccaacagcgctcacccgcgcggcacctcgcaccagtgcaacctggtgtcgcgccagggcaaccggcgctgtgtgatttcgttttatcgcccgccgacccagcgcgggttttccctggccgagttgtcgtttctcaagtgcctgtcggacacgctgctgccgctgatcgagtgccacgcccagagcctgcgccaggcaccgcacaccgaggtcgaaccggcccacacgttgctggagcagtcgcaattgcaacgtgagttctacaaacgcctgtccctgggcgacatcacgttgtcggcgcgcgagcaggaggtgtgcctcggcttgctgaccggtggcaccgtgccgcagatcgcggagaaactcagcgtgaagaacagctccatcgagacctacctcaagcgcgccgccgccaagttgggcgtgagtggccggcacggtctggccaagtggatggtgggcgcctgatgcataaattgagcaccttcgcgatggcctggatgctcggcggctgctcgctgatcccggactaccaacggcctgcggcgcccgtgcctgcgcagtatccccaggctggcgtgtatgcgctggcgcaggccggcacgtcggactggcagcagctgttccacgacccggcgctgcaagggttgattggcgatgcgctggtcaataaccgcgacttgcgcgtggccgcgctgaacgtcgaggcgttccaggcgcagtaccgtatccagcgtgccgacctgttcccggccgtgtcggcgaccggcgccgggcagcgccggcgtgtgccgggcgacgtgaccggcacgggcaaggccgccatcacctccagctattccgcgaccctgggcatcagcgcctacgagctggacctgttcggccgcatccgcagcctcagcgaacaggccatgctcacctacctgggcaccgaagaggcgcggcgcactgcacagctgagcctggtcgccaacgtcgccaatgcctacctgacctggcgcgccgaccaggaactgctggccctggcccggcaaaccctggtggccaacgaacacagcctgcgcctcaccggccgcagtaaaaccgccggcaaagcctcggcgctggacgtggtgcaagccaccaccagcgtcgaaagcacccgcgccagcgtggcccgctatgagcgccaggtcgcccaggacctcaacaacctcgccctgctggtaggcggtccggtggacgaacagctgccgtcgcgtccacttgccgccgacctggtggcgcgcgtaccggccggcctgccctcggacttgctgcaacgccgcccggatatcctccaggccgaataccagttgcgcgccgccaacgccaatatcggtgcggcccgcgcagcgtttttcccgtcggtgagcctgaccgccaacgccggcagcgccagcaccgaactgtcggggctgttcaagggcggctcgggcagttggacgttccagccgcagatcaacctgccgatcttcaacgccggcagcctgcgcgccagccttgactacgccaaactgcaaaaagacatcagcgtggcgcagtacgaaaaatccatccagaccgccttccaggaagttgccgatggtctggcggcgcggcaaacctataccgaccagttgcaggcgcagcgggatttcgtcgcggccaaccagcagtattacaacctggccgagcatcgctaccgcagtggcgtcgacagcaacctcaccttcctggatgcgcagcgtgcgttgttcagttcgcaacaagcgttgatcgtcgaccgcctggcgcaactggtggcggaggtgaagttgtacacggcgctgggcggcgcgtggaacgtcagtgcaagcccgactgccgcagccgatactcccccggcgtcacctgcgcataccgaaggaaaaaccggctgaaatacgccgggtccttgaagcccaactggtagcagatttcgttggcggaactgccggtgaacagcaacaagcgcttggcttcctgcatcacacgttccaggatcaggcgcttggacggcaggtcggccaggcgccggcacacctcattgaggcgcgcctcggtcacgccaatcccctcggcatagcgcgacagcggccagtgctccagatagtgggcctcgatcaattcgttgaagcgatggaagatgcgcaggtcttcgtgccgggtcgggcgcgccggcagtgagtgggcgcacaggcgcagcaggcgaatcatgatcaggcgcgtgaggctgtccaatgcggcggcgcgccctgcccgcgcggcgttgatctcatcgttgagttcttcgaacagttgatccaggccgtggtcacccgccgtcagcgccacgcaggccgcgccggaagccaggctggggtcggcgtcgatcagtccccacaccaactgctggcgcaccgtcagcacatgcccatcggcatccgcctcggtgacaaaggcgtggggcaccgtgggcggcgtgaggaagaacatcggcccggactccacgaactggcggtcatccaggtacacccgcaccgcgccgctcttcacgtaatgcacctggaaaaaccggtcatgccgatgcacgggcatgttgcgcccgaaaaatcccgccaggttgccgagcttgtcgtaatgcacctcggcatcgctgtaacgctggtcgtagacctgcccgatgttgatgttggggatcggcttcacggtgccctcttcttgttgttatgacgccagaggattttgccacgcttgacggtagttaacatattaattataacgttaacacattaacgaactgcctatgcagcagtcgccaccgccaggagaaacgcatgagccgtaccctgcatgatgttgccagcggcaccctgttcggcgtcgcgctgaactaccagggcctgctggaccagcatctcgccgccttccagcaggcgccctaccagaagccgccgagcaagccggtgctgtttatcaagaccccgaatacgcgcaacgagcacgctggcgtggtgctgcaccccgagggtgaacgcctgcaacccggccccgcgttaggcgtggtaatcggccagcgcgccagtcgtgtcagcctggaaaacgccatggcccatgtggccggctatgtggtggtgaatgaattcagcctgccggaagacagctactaccgcccggccatcaaagccaaatgccgcgatggtttttgcgtcctcgggccacagttagtcccacgggaccagctcgccaaccccggtcaactgagcctcaagatgtgggtcaacggcgaactgcgccaggaaaacaccacggccaattgggtgcgcgatatcccgcaactgatcgccgaaatcagcgaattcatgaccctgcatcccggcgatgtgttgatcaccggcacccccgaagggcgcgtcgatgtgctgccgggcgacagggtagaagtcgagatcagcggcgtgggccgtctgctcaatcacattcaagcggagaccccagcatgaaacacgcccgtatccgctttgaaggtgaagtgcacgccgtacaggtgcaagccgacaacaccgtgcgtttgagcgatggtcgcctgctcgtcgaagaccaggtgcagtggctgccaccggccaccggcaacatgttcgccctgggcttgaactacgccgaccatgcggccgaactggccttcaccccacccaccgaacccctggccttcatcaagtccgtcggcacctacaccggccaccgccaggtcacctggcgcccggacaacgtcgcctacatgcattacgagtgcgagttggtggcggtgatcggcaaggccgcgcgcaacgtcaagcgcgccgacgccctggcctacctgtccggctacacggtgtgcaacgactacgcgatccgcgactacctggaaaactactaccgccccaacctgcgcgtgaaaaaccgcgacgccaccaccccggtcggcccgtggatcgttgatgtggccgatgtgcccgaccccggcaacctgaccctgcgcacctgggtcaacggtgagctgcgtcaggaaggcagcacccgcgacatgatcttcgacatcccctacctcatcgaatacctgtccagtttcatgaccctgcaacccggcgacatgatcgccaccggcacgcccgaaggcctggccgatgtggtgcccggcgatgaagtggtggtggaagtcgaaggcgtgggccgtctggtcaaccgaattgtcagcgaggcggagtttttctccgcccggaaagaggcgtgagcagcatgatcaaacactggatcaacggccgtgaggtcgaaagcaaagacaccttcatcaactacaacccggccaccggcgaggcgattggcgaagtcgccagcggcggtgccgaggaagtggcccaggccgtagcggccgccaaagacgcgttcccgaagtgggccagcaccccggccaaggaacgcgcacgcctgatgcgcaagctcggcgaactgatcgaacagaacgtgccgcacctggccgaactggagaccctggacaccggcctgccgatccaccagaccaagaatgtgttgattccccgggcgtcgcacaactttgatttcttcgcagaagtctgcacgcgcatggatggccacagctacccggtggacgaccagatgctcaactacaccctctaccagccggtgggcgtgtgcgggctggtgtcaccgtggaatgtgccgttcatgaccgccacctggaagaccgcgccgtgcctggccttgggtaatacggcggtgttgaagatgtcggaactgtcgccgctgaccgccaatgaactggggcgcctggcggtggaagccgggattcccaacggtgtgctcaacgtgatccagggctatggcgccacggccggtgacgcgctggtgcggcacccggatgtgcgcgccatttcgtttaccggcggcaccgccaccggcaagaagatcatgcagaccgccggcctgaaaaagtactccatggaactgggcggcaagtcgccggtgctgatctttgaagatgccgagcttgagcgcgccctcgatgcggcgctgttcaccatcttctccctgaatggcgaacgttgcaccgccggcagccgcatctttatccaggaaagtgtctacccgcagtttgtcgccgagttcgccgcccgcgccaagcgcttgatcgtcggtgacccgcaggatccgaagacccaggtcggctcgatgatcacccaggcgcattacggcaaggtcactggctacatcaagatcggcatcgaggaaggcgccaccctgctcgccggtggtctggaacgcccggccaacctgccggcgcacctgagcaaaggccagttcatccagccgaccgtgtttgccgatgtgaacaacaagatgcgcatcgcccaggaagaaatcttcggcccggtggtgtgcctgatccccttcaaggacgaagccgaggccctgcaactggccaacgacaccgagtacggcctggcctcctacatctggacccaggacatcggcaaggcccatcgcctggcgcgcgggatcgaagccggcatggtatttatcaacagccagaacgtgcgcgacctgcgccagccgtttggcggggtgaaaggttccggcaccgggcgtgaaggcggccagtacagcttcgaagtgtttgccgagatcaagaacgtgtgcatttccatgggcagccatcacattccgcgttggggtgtttaacccccgccaaggcgctccaacaacaataatgaacctggagaatcatcatgggcgaagtggtcctggcagcgaagatctgccacgtgccgtcgatgtacctgtcggaactgcccggcaagcatcacggctgtcgcgaagcggcgattgccggtcacaaggagatcggccgccgcgcccgcgaactgggcgccgacacggcagtggtgttcgacgtgcactggctggtcaacagcggttaccacgtcaattgcggcgagcggttccagggcacctacaccagcaacgagctgccgcacttcatcaagaacatggagtacgcctaccccggttgtcccgagctgggcgcgttgatcgccgccgaggccaacctggccggcgtgcgcagcatggcccacaacatcccgagcctggagctggaatacggcaccctggtgcccatgcgctacatgcacatggacgtgccggaggctgagacattcaaggtcatttccatcgccgcctggtgcgcctggcaccgcctggaagacagcttcgcattcggtgccgccgtgcgccgggccatcgagaagagtgaccgcaaggtactggtgctggcctcgggctcgctgtcgcaccgcttttcggacgaccgccaggccgaggcgaatatccacacctggacccgcgaattcgacaagcaagtggacctgcacgtggtggagatgtggaagcaaggccgcttcaaggagttctgcgcgatgctgccggactacgccgagcactgcttcggcgaaggcaagatgcacgacaccgcgatgctcctggggctactcggcgggccggattacgccaagccggcggagatcatcacaccgccgttcggcagttcgggcaccggccagatcaatgcgattttccccctgtagaaccgggagcaacccatgccgcactttatcgccgagtacaccgacaacctcgaaccacaggccgacctgcccggcctgtttgaaaagatccaccgcgtgctgggcgacagtggcgtgttccccctcggcggtattcgcagccgtggcgtacgcctggacacctggcgcatggccgatggcaagcacgactacgcctttgtacacatgaccctcaaggtcggccatggccgcgacctggccacgcgccaggcggtggccgaagcggtgttcgcggtgatcaacgcgcactttgccgagttgcaggcgcaacgtttgctggcgctgtcattcgagatggtcgagctgcatccgcaactcaatttcaaacagaacaatgtgcatgcgttcctgaataacccggcggggtaaacccgctgttctccccacggcctctcagacaaaaagtacaacatcatgagcacagcccactccaccgccagccgcgtgctggccgagcacgaccgtacccatcgttcagtgacgtggcgcctgatgccgctgttgctggtgtgttacctgttcgcccacctggaccgcatcaacatcggcttcgccaagatgcagatgagcagcgacctgcagttcagcgacacggtctatggcttcggcgctgggctgtttttcatcgcctatgcgctgttcggggtgccgagcaacatggccctggaccgcgtcggccccaggcgctggatcgccagcctgatggtggtgtggggcctgttgtccactggcatgttgtgggtggagagcgcccgtggtttctacgtgctgcgctttttgctgggggtggccgaggccgggtttttcccggggatcctggtgtttctcaaccgctggtacccggcacgccgtcgcggccaggtcaccgcgttatttgccatcgccgtgcccatggcaggggtgttgggcgggccgttgtccggggcgatcctggaacacttccacgatgtcggcggaatgcgtggctggcagtggatgttcctgatcgaaggcctgcccgtggtgctgctggggctggtggtgctcaagtggttgccggacggcttcgacgcggtgcactggctgaccgccgagcaaaaacaccagttgcgcgaccaactgcgcagcgaggaacagcgcaagaccatcacctcgttcggcggcatcctgcgcgacccgcaggtatggctgctggtggcggtgtatttcgcggtgatgctggcggtgaacacccttgcgttctggatgcccacgctgatccatggcgccggcatcggccgcgacagccaggtcggcctgctcagtgccgtgccgtacctggccggatgtttcttcatgatcggctgcgggcgttcctccgaccgccatcgcgaacgccgctggcacctgtgcgtgccactgctgatggcggcggtcgggatcgccgtggcgggcctggcgccgggcaatccgctgctggtgatgggcgggctggtgctggccggcatgggcgccagtgccgccctgccgatgttctggcaactgccgccggcgtatctgtccaccaccacccaggccgccggcatcgccatgatcagctcgttcggcagcgttgccgcgttcctcgcgccgtacctgatcggctggatgcgcgacgccacccagagcgccagcctggcgctgtacgtactcgccttgttcatcgccctcggcggcctgctggtgctgcgcacccacgccgccatcgtcaacccacattaaggaccgttgccatgctcaccccccagcaaattctccaggccgctgcgcacctggaccgcgccgaacgcagccgcgaacaggtgcgccagttttccctcgactaccccggcatcaccctcgacgacgcctacgccatccagcgcgcctgggtcgcgcaaaagatcaaggacgggcgcaccctgaagggccacaagatcggcctcacatcgcgggccatgcaggtctcgtcgaacatcaccgagccggactacggcgccctgctcgatgacatgtttttcgacgaaggcagcgacattcccttcgaacgcttcatcgtgccgcgagtggaagtggagctggcgtttatcctcggcaaaccgctcaagggccccaactgcacggtgttcgatgtgctcgacgccaccgagtgggtgatcccggcgctggagatcatcgacgcgcgcatccagcaggtcgacccgcagaccaacgcgacgcgcaaggtgttcgacaccatctccgacaacgccgccaatgctggcgtggtgctgggcggccgtgccgtgcggccgaccgagatcgacctgcgcaaggtgccggcggtgctgtaccgcaatggcgtgatcgaagagtccggcgtgtcggccgccgtgctcaaccacccggccaagggcgtggcctggctggcgaacaaactggcaccctatgacgtgaccctgctgccggggcaagtgatcctcggcggctccttcacccgcccggtcgcggcccgccctggcgacacgttccatgtcgactacgacctgcttgggtcgattgcctgccgcttcgtctgaaccctggaggattgccatggacctgcccatcaaccgcttcaaacaccgcctgcacagcggcgaggtgcagatcggcctgtggctcggcctggccgacgcctattgcgcagagttggccgccaatgccggtttcgactggctgctgatcgacggcgaacacgcgcccaatcacctgcaaggcatgctcggccagttgcaggccatcgcgccctaccccagccaggcgctgatccgcccggtaatcggcgacagtgcattgatcaagcaactgctggatatcggcgcccagacgctgctggtgcccatggtcgaaagcgccgcccaggcgcgtgagctggtgcgagcgatgcggtatccgccccagggcattcgcggtgtcggcagtgccctggcgcgggcgtcgcgctggaacagcattgccggttacctcgaccaggcggatgaacagatgtgtctgctggtgcagatcgaaaaccttgagggcctggcgaacctggacaagattgccgccgtcgagggcgtggacggtgtgtttatcggcccggcggatttgagtgcatcgatggggcatcgggggaatccggggcatccggatgtgcaggcggcgattgaggatgcgatcaagcgcatcgtgcagtcgggcaaggcggcggggattctcagcgcggatgaaaacctggcgcggcgctacattgagttgggcgcgacctttgtcgcggtgggagtggataccactgtgttgatgcgtgggttgcaggcgctggcaggcacattcaaaggcattcccgaggctgaccacagcggtggaatctactgaaatctcatgtgggagcgggcttgctcgcgaatgcagtggtacagccagcccattctctgactgacccaccgcattcgcgagcaagcccgctcccacattttgatcctcagtgttcgaggcgttgattcaacgcttgatattgatgttcttcaagtcatccagcagacccagcagggtctgcaacttctcttcgccaaactgatcctgcaaccgctggtagttggcctccatgcactggctcatcgactcgaaactcgccttgcccttgtcagccaacgtcaccagtacccggcgctggtcctgctcggccttgcgccggtgcaccatgccggcggtttccatgcgcaccagcacgccggtcatgctcggcttgaggatgcaggccagttccgccaattggtaaatctccagttcaccgtactgttcgaggatgcggatgatccgccattgctgttcggtcaggccgtgttcattcagggacgggcggaaaaaactcatggcggcttcgcgggcttgcagcaaggccagggtcagggattgtcgaggtttggacatagggatcagggtcacgaagtatttagttaataatttaacgaaactctaacattccctgccggcgagcgcgctataacttgtcgagtgcaccgcccatggcgcgctgaatcaaatgcatgggcacgcagggtcaagacttccatctcgccagggcccctaatggaggtatccgctttagagccttccttcacttttcaggctgcgccatgatcaacatcgaaacccccacgtattacaccgccaccaagaaatacaacttgagctttcccaccctggaacaggacatcgacgccgatgtggtggtgatcggcggcggtttttccggcatcaacacggccctggaactggcggaaaaaggcatcaccaatatcgtggtgcttgaagcgcgctacctgggtttcggcggcaccggtcgcaacggcgggcagatcatggcgggcatcggccatgacctggagaagatcaagaaggacgtgggcgaagacggcctgcgccaggtgttcgagatcagcgacctgggcgcggacatcatcaagaaccgcatcgccaagtacaacatcgacgcggacttctgccacggctacggctacatgggcttcaacgcccgccaggaaaaaaccctgcgcgcctgggaaaaggacttcaagtcgatcaacagccagcacgaaatccgctttctcggcggcgcggatgtgcaacagatcatcggttccaaggcctacagcagcgccctgctgcacatgggcggcgggcatgtgcactcgctcaacctgctgctgggcgaagccaccgcactggccggccatggcgtgcggattttcgagaacagcccggcgctggaagtcagctacggcgaacgcatcaccgtgcgcaccggccgtggctcggtacgcgccagcaaactgctgtgggcctgcgacagtttcctcaacaagctggagccggagctgcaccgttcgaccatcaacacctacgcgttccagatgatgaccgagccgttgtccgaggagctgatccagcgcatcagcccgattcggggggcctacagcgacattcgcccggtgatcgactactaccgggtgaccaacgaaaaccgcctgctgttcggcgccgcaacgccgttggtggagcatattcccggcgacctcaaggcctggaaccgtcacctcatgctgaagatcttcccctacctcaaggacgtgaaaatcgacctggcctggggcggcccgatggcgtgcagccccaacctgttcccgcagatcggcaccttgccggggcgcagcaacgcgtttttcgtgcagggctattccggttttggcgtgaccccgagccacatcatctgcaaggtcctggccgaaggcatgagcgaaggctcggcgcgctacgacctggtcagctcgattcatcgcccgaccatcatcggcaaggacgcgatccgccccttgctgctgacggcgggcaaatcctggcaccagctttccggctattggaacgggcgccgctaaccgcattttttactcaactggagaactgccatgcccctcacccccctcaagcacaacgtccaactctcggaactcgaaccttggggcaccgtggccgacctcggctccgagatcctcgaaggtgacgtgcgcgccttcggcaagatgacgttcggcgcgcccaccgacccggtcagcagcgcttatttcggtaccacccagggcaagttccgcatggtttatccgtttgctgaacaagccacggtggtcactggggaagtgctgctgaccgacgaatccacgggccacacctcgcgctacaaagccggtgacagctggttcgtgaccaaaggcacgcccgtgctgtgggaagtgctcagcgaaagcttcgtcaaacattacttcgccgtcgtgtaagggaggggttgccatgacgagttctcccgactggattaccgtcggcgcactggccgacggtttcgctccagacgccttcatcctgcccaacctggccgagctggcgggccaggcgttcaccctgcatttcgccaatggctggcagatcgagcaccgtttcgagcagcaccgcctggcctggcacgccgccgatggccactccagcggcagcgcaccgtaccgcgccacctcgattcgcccgggcctgtacctggtggatttcatcaagcacgaggccgggcatagctggtcgatcagcctggtgctggacacaccaaacgcctcgttcactgccgtgatcgggcgcctgccggaccaggccgagacccacgaaggcctctaccaccgtgccctggccggcaagccgctaacctcggtggaagtcgacttcctccacggcagcctcgaccgcccgtggcaggccggccactgccggcatgcgcccaccgaggaactggtgggcctgcgcaaccaataccgctacagccccagcgaggtctacgagcacatctacctcaacgagcggttctatgcctggcaatgcctcaaaggcgtggagcaaggcctgtgcgacaccgaccgctgtcactactacaagatcgccgaacagctgtacctgttcgtgtggcaggagaagatcgtgccgaccctcggcctggtgctgatcgacctgcagcagcaccgcagcgacggcaagatcttcggctatgccggtgcgtctttcgatgcgctgtcgaatttccccatcagctcgtattgccaggtgctcaaccgcacggagtatcccgatgactgagccgcgcacggtctaaatgtgggagggggcttgcccccgatagcnnnnnnnnnnnnnnnnnnnnnnnnnnnnnnnnnnngctatcgggggcaagccccctcccacatttgatctcctttgttttgaagatcccgtttatgcccccaccgcctgcatccggcttgaacggaaatccttcggcgacacctcgaactgcttcttgaacgaccggctgaagtgcgccgagtcggtaaagccccacttgtaggcaatcgaggtgatcgactcgctgcgcaggcacgggttggtcaagtcatctgcgctgcgcttgagccgcgcgcgctggatgtagcggcacacgctatcgtcctgttcttcgaacagacggtacaggtggcgcaccgagatattcagccggttggccaggccgatcgggctgagccccggctggctcagggattcatcgatgaccttctgcacgtagctgcgcaggttgctgccctgcagcgctgccaggccgtcgcggcactcttcgccctgctccagggccgatcccagcagcgacacgaaagccatctgcaacgcctccacttcacccgcgccgtctgcggtggcgtccttgcacagttgatccatcagcacatgcagcatgcgcccgcaggctttggtcgaggagatcttgccgaaagcccgtgcgtcgccgcccaggtgcttgcacacctgcggccgcgagagtgacagcgaggcgtgttcgatcaggccgaagggggtgatttcgatggagcccaccgagtccatcaacagcatctcgccaggcgccagttgcagggtctggccgttctgcgcgatctgcgaatagccgctgcgttggctgaccaggaaacagtcctggtcgttgtcatggtcggcgtggtgcgccgggcgtttgatcagcccggcattggtgcgcaggatggccacgccgcgcggcaagtctcggatctcgccgatgaacagcgagtggttgaacgccagttccgtctcgaaataaccgcacgcggcgcgtagctcgcggttccaagtgtccagcccgtcgtgtgcatgctgtgggatgctcatggggtgtctccgcaatggcttctttttgttgttctgatgcaatagttaacatgttatctatatgcacgcaacaacaacctgtgtgcccattgcgcaagcactaatgatgccaatcagaggttcgacaacacccgattcaacccgaccagcgccgcgagcaaatgactgcgctgcaccgcgctcagggcgatataacgccgaaacgccggcaggcgattgaccacctcgctgccgcccatatgctccaggcgcacgcaccattgctggtcgtgcagctcgatgcgcagacgcttgaaatccagcggcatcagcgcctggaacaacgcctcatcggccaacaagcgtgcctgcaactcacggcccaatgcctggttgccggcacggcgctgcacacgaattccatggcgccggatcgcgccgccatggtgcaccgcgaaactcgccgtgccgcccgtcgcagtcggtacgcgcaggacaaactcggtcagcaccaggtgcatcaacaactgcgactcggtgcgctcgacaatctcgaacgccacgccgtccacttcaagcgttgccagcccaaggttgcgccgcaggtgcgccagggtcacccccggtcgataccccgacggtgcacgatcggcacgccacagctcaaacagtctttgccgcaaagtcgccataaccgtcatcagcctgctccggttggttactgaactcctttgccaatacctcctccacagaggccggcttgaaggggttgaccttctgcaccaccagggtccagaacagtgcatacgccgccgtaccggccagcatcacgccaaacggcacatagatgtccgccggggtcatgcccggtggcgtgatgaaccacatgcccagcaggatgccgatgctcgacacgatctgcggcagcgggaaccacggcgagcgataggcccgtggcaagtccggccgccgaatacgcaggctcaccaccgagatcgtcaccagcaggtaggcaaagctccacgcacacaccgctgccagcaccaggtgcatgatgttgtcggtgttgccacccaggtacagcgcgtgaaggcagggaatcagcatcgccaccaagatgcacagcagcggcgtcttgaaacgtgggtgcaggtaggtgaaaaccttgggcaacgccccgtccaccgccatgccgtagagaatccgtggcacgccggccatcaaggtattgatggtggccgcgccggcaaacagaaaaccgatgcccagacacagcgggccgatctgccccatcacctgctcggcgaacctggggatggccatgggcgtgtccagcaggtgcacgcccgaggcggcatcgagcaccacgttttccacctggcgtttcatcgccgcgccatagatgaacatgcaggtggccacacccatcagccccagcatcatcgcgcgcggcatcaccttggccgattggcgcaggtccggcgccagcggcgtgacgaactcgcaaccgacaaacatgaacatcgccatgcccaccagcgacagcacggtgatcaggtcggtgcccaccagcgactcaccgaaccagccttccaactgcacagcgggcgcggcgatcaagcccagtacgccaaacaccatcagggtggtccacatgccgaaggtgaggatgatttccgcccggccaaaagcactgacgccaaaggcgttcagcaccccaaagacgatcacgaaacccacgccgagcaaccatgacccacccgccgattccgccagggtgttcaagtgttcgaagttcaccagggccatgaccccggacaggatggtttcagcagtgccggcaaacacatgcacgatcaggtacgccgacaaggtgccggtgatcgcgaaaaaccgccccatgccgcaattgatgtagtcgtacaccgagccggtggtgggcaggatcgaggcggcctcggcaaaggtggtggcctgggccagcatcattaccacggcgatcagcatcgccagggcgaacgcactgccgccgatgccaaagcccatagtggcggtgaggatcaccgggctggccatgatcaggccaatggtgctggccaaggcggtggggaaacctaccgtaccccggttgaggtgcgcggtgagtcggtcgttgatcgacatggtggggtcctcgaagacggtttttttaatgtatcggtactctgcgccccactcgaattgatcgtcttgcccctgtctgccgccggttttgttgctccctgccacagcgggcggcgtggcggccagggtcaattgcctggcacgcagagaaaagactcaggcccccgccactcgccctaatgcgccctcactcttaaccaagctggggacaataacaatggagcacacactgaaaaatcgcggcctgcgccaggcggtcggcctggggattgcgctgctggtgggccaagcccaggcggtcgagctttacgccgatgccgacacccacgtcaccggcaacttccttgccgtgtacgggatgttcaacagcaagaagaactacgacgggcgcaacggcggttccacctggcgcgaggccttcatcaagtacggcctgagcgtcgaccagagcctgggccgctttggcggcgtgtatggcacggccaacctggtgagttccggcacctggggcgatggcgatgcctccggggtcaccacgggcaaggagcgcaccaccaagttcgacgaagcctttgccggctggcgctcgggcgagctgttcccggcgttgggcaaggacggcgtggacctgtcgttcggtcggcagatcatcatgctgggcgacggttttctcatcaacgacgacggccccaatctgggcaagggcgtgggtgacggcgagttcaaccgtggcggtgcctactacatcgccgcacgccatgccttcgacaagactgcggtgattcgcctcggcggcaaggacggcgtacatggcagcctgatgtggatcaagtccgacaaccccgcccaggccatgaccgaaatggccgccggcaccctggagtacagcgccgcgccgggcaccctggggctcacgtatattcatggaatcgatgtggacgagcgcttcgccagcgacgtgcagcgccagcgcaaaggcatgaacctgtacagcctgcgcggcgccggcaatgcaggtatcgacaacgcgcacttcgcctttgaactggcccgccagaaccgccgcgacagccagcagaacgccggctacgccgaagccggctacaccttcgccgacctgccctggtcgccggacttgacctaccgctacgcgcgctattcaaagaactgggacgcgatgttcgccggcttcaaccgcggctacggcacctgggtgcagggtgaagtggcgggcaactactccggcccctacaacaccaacacctccgtgcaacacgtggcgctcaaggtcaagccactggagaacctcatcctgggtgcgctgttcttcgactacaccaccgtcagcacccgcggccagccgaatctggacggtcgcgagctggacctgtacgccgagtgggcggtgaacgagcacctgatcatcacgccgctgctgggcctctacaaacccgacaaggatgccgaaaccggcggcaaccaggtcggtggcaacggcaccaatgtctacagtcagttggtggtcgccgtaccgttctgaaccgtctcgggcgcgcagggacgcagcgcctggacctcggcataagcgccctggtgatacaacagcggcgcacgcccgaaatcgtcgaaggccaccaccttgccgatcatgatccagtggtcgccaccgtccacctgctggtatttctcacagtggaagcgtgccgagcaatcggcgaacaccggtgaaccgccctcccccggttcgtactcgatcagcgcgaagcggtcttcgcgtgggcgcgcaaagttgttggacaggtgcacctgatccgccgccagcacatttaccgcaaagtggctggcctcctcgaacacttcgtggctgttggagcgtttgtcgatactccacagcaccagcggtgggtcgagggacaccgagttgaaactgttggcggtcacgcccaccttgcgcccggacgcggtagcggcggtgaccacggtcacgccagtggcgaagttgcccagggcacgacgaaaggcccgtgggtcgaaaaggctgttgtcaggcatgcaagactcccgggcgccctcgaacggacgccctgattgttgtagtggaagaacgggtcacaccatgctcgggtccggctccaggcccatcagctcacggccgaggatctgcgcgcagacgtcgtagtcggtgtaggcatgggcgccggtcatatgcgaatcgcggaacaggcgctgcatttcgttgtgttcgaaccaggcattgccaccggctgcggcgaacaggcggtccaccgcctcgatgcacatcttggtggcgtaggcctggttggtgcgccagaacgccagggtttcgcggctcgggtaacgctgggcggcgctgtgttcggcgtggtcctgccaggttttttcgaggaatgcgcgggcagcggccacctggtgggtggactcggccaggcgcatcaacgccggcgttgccgcgcccacggcagcaccagtgtaggcgcgcacgcgggttctggttttttcgcggaacacctccagcatgcgctcggccacgcccaggctgacggtggaaaaaccactggcgaaatacggccggtatggcgcgtagaaaatctggctgtcggggtagaggccaaaacctgcggacttgccctgcatcatgtccctggccttctggatccggtgctcgggcacccaggcattgtcgatgaccagagtcttggtgccgctgcctttcatgccggcggcgaaccagtcatcgcggatctggtagtcactgcgcggcagcacggcaaagcagtaatcctgggtgccttcggcattctgtcgacggcagccgacaatcgcccattcgccgtgatcacagccgctgctccagcccatttcaccgctgaagtgcacaccgccttcgccctccaccacgcgcccgaacggcgcaatactgctgctggcggtggcatccgggttttcgccccagatttcctgctgcaaccgggccgaaaacagcgccagttggtggctgtgggtgcacagcaagctcatggcccaggcggtactggcacagctgccggcgagcaaggcgatgcagtcggcgaactcgggcagcgacagttccaggccaccaaaggccttgggttgaaaggcacggtgcaggccgatgcttttgagcaaggcgatgttctcatccggcacctggcgttgctgttcggcacgcgtggcattcgccgcgatcagcggcaggaggggcttgaggtcttcgaggagtgggtttggctttttcatggacggccccgcttattattggaagtccggcagccgctccaagtcgaggagcagcgctggatgcagggccagtatcgaacggcgcgggccggtggaaaatgcacgttccacaggcaagattgtacttttcacaggcgcggcagccacaggcatgacgcctggcaggcacagtcaagccagacgcgggtggcttgattaccctcggcttttcttttgtgaactgccaggaacctgccatgagtgatatcccgctgctgcctcacgtcgaagcgtttttacgtcgaccccatgggctgttcatcgacggcgtcaacgtccgcagccattccagccagacgctggcggtgaccaatccggccaccggtgaggtgatcgcccaggtcgccgatgccgacctggcggatatcgatgcagccgtcgactccgccaaccggggcttccagttgtggtcccaggctgcgccggcgacacgcggcaatgtgctgctcaagctcgccgacctgctggaacgcaaccgcgaagaactggcgcagatcgagacctgccagtccggcaagatcatccagattgcccgtgcgttcgaggtcgaccaggccgcgcatttcctgcgttactacgcaggctgggcgaccaagatcagcggccagacgctcaccccgtcgctgccctcgttcaatggcgaacgctacaccgcgttcaccctgcgcgaaccggtgggcgtggtggtgggcatcgtgccgtggaatttctcgaccatgatcgccatctggaaactcgcctcggcactggtgaccggctgcagcatcatcatcaagcccagcgaattcacgccgctgacgatcctgcgcatcgccgaactggccatcgaagccgggttgccagcgggtgtgctcaacgtgttgacgggcggcggccacgtcggcaaaggcctggtggaacaccccggcacgcacaaggtgtccttcaccggttcggtgcccaccggcatcgccgtaggccgcagtgccatgggcgccggcctcacccgcgcgaccctggaactgggcggcaagaacgccgccggcttcctgcgtgacgtggacgtggacaaggcggtggacggcatcatcgaagccggttttttgcattccgggcaaatctgcgcggcggccgaacgtttcttcgtgcaccgctcgcagatagacgcggtgctcgacaaactcagccagcgcctcagccgcctcaccatcggctcgccgctggacgaacgcaccgaattcggcccggtcacccaccatcagcatcaactcaaactgctcggctacttcagccaggcccgcgccgaaaacaaccggatcatccacggcggcaaactcatcgaccgccccggctgctacgtcgaacccacggtgatcctcgccaacagcatcaacgacaccctgctcaacgaagaaaccttcggcccgatcgcgaccttcctgccctacgacagtgaagacgagctgctcgcgctgatgaacaacggcccctacggcctcagcgccagcctgtggaccaatgacttgggcaaggccctgcgcatggtgccggcgatcaaggccggcacgttgtgggtgaacatgcacacactgctcgacccggcagtgccgtttgggggcaatcggtcttcgggggttgggcgggagtttggcagtgcattcatcgaggattacaccgagctcaagtcggtaatgattcggtactgagggtcagccctttcaaggtctttgaaaaaccggccatatctggctgataccctcccaatagggcggacactgcaactgtggcgagcgggcttgccccgcgttgggnnnnnnnnnnnnnnnnnnnnnnnnnnnnnnnnnnnnnnnnnnnnnnnnnnnnnnnnnnnnnnnnnnnnnnnnnnnnnncccaacgcggggcaagcccgctcgccacagaaagcccactcaccacaagaggcccgcctgccgatccccctaattggatttacgcctgcgcaatcaccgcctccgcctcgatctcaatcaaccaatccggcaacgacaacccgctgacgataatccacgaagacggcggcgggttgtgcgggaagcgctcgcgcagcgcttgcgcgatcggctcctgctggtcacgggcggactcgacgatgtacagccgcaacatgatcacgtgagacaggtcaccgccggcctcggccagcaccttttcgatgttgtccaaagcggcggcggtctgttgcgcaatacccgggccgacggtgcgctcgtcagcatccacaccgacctggccggacagcatgatgcgccggccttgcggcacttccatggcctggctgaagccgtattgcagggcgttgaataccgttgtgggattaatgaccttccgttgcatgacacttccttgttgtttgtaggaaaacaaggctaacccaaagcaatcgttcaatccggcggttcaacatcccgcaacatatcggggatcgtcgaggggtgggacagactaccaactccccatcgccagactgaacggcgaaaactccgcgaactgccaccgcaacgccaacgccgccgggcgccgtacgacatgttccacggtgaccgtccacaagcgctgggcgccctcgaacagcgccacttcagggccatcgaggatcagtgaagtacgcccagccacctgcagcacatcccccgattcaaaatcgataaacaacaaccccgccaccgggttcacctgcaaattacccaaggtgttgaagaacaggttgccggcaaagtcagggatggtcagcacgttgccttcgacccgtacaaaacccgtattgccgccgcgatgggaaacgtccaccgagcgctggccatccacctcgacatagctggcgacgaagaaggtatcggcgttgcggattgccgcttgggccgcctcatccaggctgctggaacgttcggccacgctaccgggtttacgtgcgacggcatccatcggccgcagttgaatgtacttggggcaattgccgaacgtgtgcgccacgtcgaccgaaaagccctcgtgatcgagcacaccgatacgcccattcatacggttgcgacggcgggtgttgaggtcgatgcccagcaagccaatggatgcgccttcacgcaaggcattgcgggcagggtcgctcgcggatggcaagctatcaacctgcaaggtctgtgggtccggcgagtgggcaaagcccggcgcaccttcaagcatcgtcgcccagggaataccttgctcgtccaccacacccagcatcaggtacggcaacaaggggtagaaatcccgatgctgctcgggcaaatggtcacggatcaccttgggcccgaccacggccattcgctcggcgacgcccacagcttcttgcatgtgccgttcaccggcatgccagggggattgttcgatcaggttcatggcaagcacctcatgttggataacccgatgctgcgccctgcccgccaccgagggaatcaccacgccaggcaatccactgttacgccagctgaaatgccgggtgttcacgcagcgccgccacgcagtggtcgacaaagctgcgcacgcgcatcggtgcgttgcggccttggcgatacaccacgtgcacgggcaatggcggctgttcaaaacccggcaacaggcggcgcaattgtccattctgcagatgctcgtgaaccgggtaactcaggcagcgaatcacccccgcgccatgcaccgcggcattgatcgcgccctgcaccgtggcgcagccaaggcgcgcacgggccttgagttgataaccctggaaatcccaatgcacctgatcggcactggcaatcagccgatgctgcttgaggtcgtgcgggcgttggggctcgccatgaacagcgagatagtcggggctggcgcaaagaatattccgcacctgccccacgggccgggcgatcaatgatgagtcgggcagttcaccgacgaggatcgccacgtccagcccttcttcgtgcaggtttggataatagtcgtggtaatgcgccgcgaggctcacctcgggataacggtccaggtagtcggccaacaccggcgccatcacataacggctgaacaaaaagggcagaaacacccgcaggttgccctgggcctgcacatgcaagcctttggccgaggcttcggcggcgtccacggcggcgagcaggcgcacgcaatcggccaggtacgcgttgccggcgtctgtcaggttcacgccgcgcgtgctgcgctcaagcaaccgcacgcgtagccgcgcttccaggcgggcaaccgcacggaccagggttggtccggacacctgcacactgcgcgccgcgccggccaggctcgagtgcccggccagtgcggcgaacagttgcatgtcgcgatagcgctccatcaaccgcgccgtttcatcgccgggttcagggcggcgtcctggcccaggcgatggctgaggaagtcgacaaaggtgttgaccttggccggcacgcggccgcttttctggaacaccacctggatcggtaacggctcagcctcatacgcttgaaggacgatctccaactcgcccgccgccaccgccgtggcgacctgataggacagcacccgcgtcatgccccagcccaggcgtgccaggttgatcgcggcattgtttgccgtaacgaccaggcgcggctcgatgggcacggtcaagggttggccggcgtcgacaaactcccagccactcaccagttggctcgacgatgacgtgacgatcttggcctcacgcaactgcgacggatgctccggtcgcccgtgctggtcgagataggctggcgctgcacagacgacccggcgcacttcaccgaccttgatcgcctgctggcccggctcgtgcagatgaccgatacgcacggctacatcgacgccttcgtcgaccaggttgaccacgcggtcgaccagcaacgcattgatgttcaccaacggaaagcggtccaggtattcccccagcaccggcgccacatacaactcgccgaacagcaccggcgcggtgaccgtcaggtggccgcaggggatggagtaactgcccgccgccgcttcttcggcttcatcgagttccgccaggatgcgccggcaatcttccaggtaacgctggccggcttcggtcaggtgcaagctacgggtggtgcgcgccagcagttgggtaccgatgcgttcctccatggcggcaatggcccgcgtgacgctgggcggcgaggtgttcaggcggcgcgcggcggcggcaaagccctcctcctcggccaccgccaggaacacctgcatttcatgaaatcggtccatcggcactcctctcaagcaactgcatattgctattcccctgtggcgagcgagcttgcctcgcgttgggctgcgaagcagccccaataaggccgctgcgttgtttcagaaaatacgcggtggcaggtttcagggccgcttcgcgccccaacgcgaggcaagctcgctcgccacaacaagggttcacgttaatgggattgcaagcccacggctgtgcgtggcatgccgacgaaccccggcaacgcttcaatgctggcaagccaggcgcgcacctgagggtagtcggccagcgacacattgccttcgggcgcatgggccacgtaggtgtagaacgcaatatcggcaatagaaggctgctcgccggccaggaaacggctctggctcagttgtgcctccaccagcttcaacagggcatgggaacgagcaatggcggcgacggtatcgacctcggcaccaaacacggtggcgagccgcgcggacgcaggcccggcgctcagttgaccggcggcagccgagagccagcgctgtacccgcgcctgtcccacaggatcgcccggcagccattggcccttgccgtaggtgttggccaggtaaaccagaatcgcattggagtcggccagcaccacaccgttgtcatcgatcgccggcacctggccgaagctgttgatcgtggccagatagtcggcggtcttgtgggcaccttgcttgaggtccaccaggttgtattccaccggcaagcccagcagggacagcatcagttccacgcggtgggagtggccggacaacggaaaaccatagagtttgatcatgaaaggctccaaaagaagggggtctcgacgccccgcatactccaccgctgccccggccgttggaatcaccaggatttacaatcgagcatttcatccgatgaaacaataccgctcagcgctcctcgagcctgtccctcaggaaccgatgactcaccgaaaacaaccgccgataggtcagcagcaccgcccccaccgtgcccaacgccgacgacgcggcaatcaggaacatgatcccgatctggtaccgcaccgcgtccaccgggctctcccccgccagcacctgcccggtcatcatgccgggcaggctgacgatgccgaccaccgtcatctggttcagcgtcgggatcatccccgcacgcaccgcctggcggatggcttcctgcgcggcctcccagcgtgaaccgccgagggccaggatcatttcgatggtgttgcgccccgaggtcagttcctgggtcatgcgttcgatgcccagggagacgccggtcaaggtgttgccgaggatcatgccgaggatcgggatcgcgtactgcggctcgtaccaggggtggatgcggatcaccgcaaacaagcccacggcggtgaccagccacgaactgccccacaccgacaggatgctgtcgacccgctggccccggtaagtctgccgcccacgcccggcagcggagaggcccgcgatcagggtcatggcgcacatcagcggcagcaccacgtaccagtaggcgaactcgaacacccagcccagcaggtaaccgatggccagcagttgcaccacggtgcgcaccgccgcccacagcaattggcggcccaggcccaggcgcaacagcagcgacagcgcgccattgatcaggatcagcgaggcggcaatgcccatgtccagcgcggtgaggttctggtaattcatggctgggacgctccgctcaacacaccggcactcatctgcaaatggaggtcactcatgcgccgggcctggtccaggtcatgggagacccagatgcaggcacgggtgcgatcactggcaaaccaggcgtcgatcagcgcttccacttcgcgggatgaggtgggatcgagggcggcggtgggttcatcgagcaacagcacttcggggttcagttgcagggtgcggatcagcgaaaccacctgggactcgccgcccgacaggtcggcggcgcgtttggccagaaagtccggcgtcttgccggcgtggcccagcagtgtggtcactgtcgccagatcgaagctgcgcttgcgcgaggtgttgaggctgaaggggaagcgcaggttgtcctccacggtgccgtcgagcagcgccgggcgttgggacaggtagctgatatggcagcggtagtggggaatctgcgcgttgccgatcggctggccgttccacaggacctgcccggaggtgggcgcatccagcagcgccagtgcgcgcaggaacacacttttgccggagccggatgagccggtgatcgacacgcggtcgccggcctgcaggctgaaatcggtgggctggagcaacggcacctggcggcgctcgtccaggcgcgtgagggcgcgggtttcgattaacggggtgtcggtcatgaactcattactcggttgaacggcttgcaatcaaaaacctcactgcctatattccctgcctggcgctctctacgccaccttccgcggaaagggctgcgcccaggacactgcaacatcctcttttttctacgactccccaccttgaagcggaaaaggtttgtgcaaggagatcgtatgtcccaacccttcaacaccgatggccgtctcaaccttgagcaacagcgcaagcgcgccaaggaactgctgccgcgcctcaaagcccaagacccgaacgctaccttgtcccaggcccaatgggaaatcgccaagcagctgggcttcagcagttggccaaagctcaaggcccatgtcgatgccatcgacttcgccacccgccaccccgattttgccgccagcgatgaagcccgcaccacccactggcgctgcggcaatgacattgcccacagcctgcaactggcggggttcaaaggtcagttccggatgctcaccgacccgctgtgcatggggccggtccgcaatctgccccgccaagccttccgcgccctgcgcagcgcttttatcagccaggcctttgccattgatgcagccgatgcagctcgtcgcgtcgacgccgaatacgaccacctcgaagcattggccagcgccgaccacagtgtgctgtggtgcgaagcggatgcctatgaccaactgttcctgatccgcgcactcgccggccttgaacaggtgccgcgcaaactggagctcatcgaggtggaccgcattcctggcgtgcagcgctttatcggcatcggccaactggcgccggatgtattggcgtggctgtggccgcagcggcgcttgatcggggatgatgcggtgcaattggccaaacaggcctggtcggcgtattgcgacagctcacccgtccaatgggcgcaactggcccacgacaaccaccccgccttgccgttgcttgccccggcgttgttgcgccaattacaggaactgcccggtctgcatgacggcctttcgttgaccgagcgcctggccctgacgtacctggccgagaacgggccaacgccgtttggtcgggtgtttgccgaactgatggccaagcgtgaaccgctgccgtttctgggcgacatgatgtttcatgcgctgttgcaaccgctgctcgatggcgacaagcctttactcacggccaccgagacgcacctggaatggccgcgccaggtgctggcgttgactgcgctggggcaagccgtgctgaacggtcacgccaactggctggatcacgccagccatgtgcgatgggtgggtggggtatgcctgcgacctcgccaaccccactgggcgattgatgagcacatcatgccggtctggcgcccgtgattacgctaacgtgctgcccattcaaccttcacttgcgagactgcccatgcgcaacctgatcttcgccagcctgcttctgctggcgggctgccaacaaacgccgccggccaatgaccaactcgatgccgtgctctggacccagacctctatcgagcatgagttgatttaccgacagcttttcgccaatgccacccgccaacttgacgtggcgttggccgatcccacctgggatgccctgccctttgcgccacgcaacctgaacgggttgccgccggcggtggtggtcgatatcgacgaaaccttgctggacaacgtgccgctcaacgcccgcgacgtggtcaacaaccaagtctattcctacgaccgctggaacacctgggtcgaccaggccaaggcccaggccttacccggtgccgtggcgttcctgcaagcggcccggcaaaaaggcatcaaggtctattacctgaccaaccgcgaacacagccaggtcgccgccacggtgaagaacctgcgcctgcgcggtttcccaatcgaaagcgacgaacaggtcctggccgccagcccccccaccggtcactgcgaaagcgccggctacggcaagaactgccgccgccaatgggtcgccgcccatgcccgcgtgttattgatggccggggattccctgggggatttcgtgcaggccgaccacaacaccctcgcggatcagcgcaaggcggtggagccctatatgcactggttgggccagcgctggttcttgttgcccaacccgacctatggcaactggtacagcgcgccgtatggggatgatgagaagttgccgttcgagcaaaagcgcaagctcaagcaacaggcgttgcagttgcaggagtaatccgccttggctggcccaccgtgcttgacgccatcggcccacatctgattgacacaacaaggtcatatggaaatgaaacgagtacttatcgcatcgctcggcgctctatcgctgctccaaccgtcattctcttcagcggatatcaccaacgggaaaaccctcttcacccagcggtgtgcgatgtgccatggcgccgatatcagaggtacaggccccctggccaacaagagcaatcccccgacacctgacctgaccaccgccacgttcaaaaaacgcctgaatgactacccaggcgttatcgtctcttcaatcatccttcgccccaatggcgacctgatcccgaggacgttgcgagagaacggcgtgaagctagcgccattcgcgtggagggttagcgacttccgcgatttgaatcaatacatgagcggtgtgattgccaagacgcgttgagtctcacagcgttcttgcagcgatcgcctccacttcaaccaacgcaccgggcaatggcaacgccaccacttgcaacgccgtacgcgccggtttattcggctgttccggtgtgccaaagaactgcgtataccccgcctgcaaaccggcgaagtccagcccgtcaccggcgaagtacacccggccgtggccgatgttggtcaccgaggtgccgctggtgtcggccttgaggaccacgttgatcaccccggcgatggcatccgagccgtattgggcggcgacaccgggctgctggtgagggtacgccgctcggggtaggctgttgagctcaaacataacggaatgggttttgaaaacatgatgctatttcggcataatataatattctttgatttaattatttattgattttgttattcatttaagtaatgtttttttgtgatctggggattgggggtatatccgttatttgggtaacggcggatattggttccgcccttacggcggctcacttttgaagagccggaatgccggcccagtcaaaagtaagcaaaacgctcttgccccaacactcggcacctcgcttaggctcggtgtgcccgtaatccgacagggatttgggggggcgcctaagatcaaaatcaaaagcagatcaaaagccagagccagagcaaaccacccttcaactgatacatgaagatcaaactgtgggagggggcttgcccccgatggcggtgtgtcagccaactcatcagtgactgacccactgcaatcgggggcaagnaagccccctcccacatttggaatgcattcccctgtgggagggggcttgcccccgatgaggccatcagcctcaccaacaattccagctcagaccaccgccgcccgccgctggacaaaccgatccacatactcatccgccggcgaatgcaggatctcccgcggcgtgccgacctggatcaacttgccgtccttgaggattgcaatgcggttgccgatgcgcacggcctcgtcgaggtcgtgggtgatgaacacgatggttttgtgcagggtcttttgcagctccagcaactggtcctgcatctcggcgcggatcagtgggtcgagggcgctgaaggcttcgtccatcaggatgatgtcggtgtcggccgctaacgcacgggccaggccgacacgctggcgcatgccgccggaaagctggtgcgggtatttgttttcgtagcccttgaggcccacggtttcgatccagtgcagggcgcgttcggcgcacacctgtttggtttcgccacgcactttcaggccgtaggcgacgttgtcgagcacgctcttgtggggcaacaggccgaagctctggaacaccatgctgatcttgtgccgacggaattggcgcagggcttccatgtccagttgcaggatgtcttcaccgtccaccaggatcgcgccgctggtggggtcgatcaggcggttgaagtggcgcaccagagtggacttgccggaacccgataggcccatgatcacgaagatctcgccagtgccgatgctcagggacaggtcgttcacaccgaccacgcagccggtttcggccagcacctggtccttggtcttgccctggccgatcaacgacagcgcatccttggagcgggcgccgaagatcttgaagacgtttttgacttcgattttgctgacagtagtcatttgctcgcctcatgccgtggacgaccataggcctgggtaatgcggtcgatgaccactgcgagaatcacgatcgccagcccggcttcgaggccacggccgacgttgagggtctggatgccgacgagcacatcttcacccaagcctcgggcgccgatcatcgaggcgatcaccaccatcgacagcgccatcatggtggtctggttgataccggccatgatgctcggcaacgccagtggcagttgcacgccgaacagttgctgccaacggttggccccgaaggcgttgatggcttccatgacttcgccgtcgacctggcgaatgcccaggtctgtgaggcgaatcagcggtggcgcggcgtagatcaccgtggcgaaaatcgccgggaccttgcccaggccgaacagcatcagcaccgggatcaggtacacaaaactcggcatggtctgcatgatgtcgagcagcggcatcagcaccgaacgcaggcgattgctgcgcgccgacaagatgcccagcggaatgccgatcagcaccgagatcaccgtggcgaccatcatcaaggccagggtctgcatcagcttgtcccacaggccaaccgcgcccaccaggaacagcaggccgacgatcactgccgtggtcaccaccttgcgggtcgcgtgccaggcgacggcgccgacaatggccagcatcagccaccacggcgctgcgcgcagcaacccttccaggttgacgatggcccacagcagggtgtcggaaatgtgccggaacacatcaccgtagttggtgaccagtgagtccacccaaccgttgacccagtcggcgatggaaaacgtaaaactctcaggaaacatatcgtgctctcgatccagtgggttgtggccaggcgcccggctgcccctcagggtagccgggcacgcttgacctacaaggccgcgtcgattttcttggctgcgtcgtcgctcacccaggcgtgccagacttcaggatgttccttgaggaaaattttcgccagttttggcgactcaattcgctccttggccatgcggcccaggttctggttcaacaggtcgatgggcaggttgaccttttccagcacggccaccagttccggggcttgttcgtggaaggtcttggacaggccgaccttgatgctcacgcttttatccacaccgggtttttcttcgagcttgaccaggtcgacctggcccatcagcggcgtgggcgaccagtagtagaacaggatcggctcgccacgcttgtagctcgacagcaccgccgcatccagcgccgggccggtgcctgggcggaagttggtgtaggtgctttccaggccgtagcttttcagcatctcgctgttgtccagctcgcaagtccagccggccgggcagttgtagaagcggcccttggagggctcttcctggtccttgaacaccgaggcgtacttggccaggtcggcgatggttttcagctccggggccttgggctccagcttgcgcttggcatcgccttcgatcacataacgcggcacgtaccagccttcgatagcgcccacaaccggggcgccgacgccgacgactttgccggccttctcggccttgttccagacttcactgcggccgacccactcttcggcaaacacctggatgtcgttgctgctcagggcgttttccatggtgatggagttgcccggcaagctgtcggttttgcagtcgtagcctttttccagcacggtttgcaggatgtcggtgagcaacatgccgctctcccagttcaggccggcgaatttcaccggcttgccggattcgcaccaaccggctgcctgggcgccagcgctggccagcaagcctgcagagagcaaggtagccatcagggtcttatgcattttcattgttgtgacgctcccaatcttgaaatggattacggcagtcagtaggcatcctgccctgtccacgtcccatcaggcctgtgcagccagcccgtttgttgtgggtatagcgccctgctctgttggcaggatcagttgatcgggcacggtgccgtgccattttttcgcacacaggtaatacagcgctgcgggcagtaccaggccgatgatccaggagatatccacatcacccagcgcggccaccaagggacctgtgtagaacttggtggagatgaacggcaactgcaccagcacgccgaacacatacacgctgataccgagcaggttccagcgcccgtagcgaccgttcgggtcggccagcgctggtacgtcatagcgctcgcgggtgatgcagtagtagtccaccaggttgatcgcgctccagggcgtgaagaacgccagcaggaacaggatgaaggacttgaacgcccccaggaacgagtgctggccgagcaatgcgatcagggtcgccgtaccgacaatcgccagcacgaacaccaggcgttgcaggcgcgtgacctccaggcggccacgaaagccgctgacgatggtcgcgatgcacatgaagctgccgtaggagttcagcgtcgagatggtgaccttgccgaatgcgatgctgaagtacagcagcgcagcggtagcaccggtgccactcaagcccacgatgtaggccacttcatgcccggcgaactgaccgttggacatggccgcggcaaacacgccgagcaccatcgccacctgcgcgcccaccaccgaacctgcaccggcggcgaaaaaggttttcaccgacgaggtcttgctcggcaggtagcgcgaatagtccgccacgtacgggccgaatgcgatctgccaggaggccgcgagcgacaccgccagcaggaaactgctccagctgaagtggcggatctgcaggagcgcgcccacatcggtctggctcatcagacggctgaacaggtacacaaaggcaatcacgccaatcacgctggcgacacgcccgatgaaatggatcacccggtagccgagcaccgtgaccaacacgatgacgctggcgaaaatcaggatgccgacgctgtcgctgaccccgaacaactggcccagcgcctgccccgaaagcacggtgccagtggcggtgaagcccaggtacatcaggcacaccagcacaatagggatggccgcgccatacacaccgaactgcacccggctggaaatcatctgcggcaggcccagcttgggcccttgcgccgcatgcaacgccatgaccccaccgccgatcagttgaccgatcaacagaccgatcaacgaccagaacacatcgccgcccagcaccacggccaaggccccggtgacaatcgcggtgatctgcaggttggcgcccatccacagggtgaactggctgaacagacgaccgtgtctttcggcttccgggatgtagtcgatcgaacgcctttcgatcaacggggtggtgtcatttgcagccatgtcggttcaacctctgatggattgtttcagggtggtactggcttacttgatcatcggcaggttcaagccctgctccttggcgcaatcaatcgcgatctggtaaccggcatccgcatggcgcatcacaccggtggccgggtcgttgtgcagcacacgggcgatccgctcagccgcttcgtcggtgccgtcgcagacgatgaccatcccggagtgctgggagaagcccatgcccacgccgccgccgtggtgcagcgatacccaggtcgcgccgctcgcagtgttgagcagggcgttgagcagcggccagtcggacacggcgtcggaaccgtcctgcatggcttcggtttcgcggttcgggctggcgaccgagccggagtcgaggtggtcacggccgatcaccaccggtgccgacaactcgccgctgcgcaccatttcgttgaacgccaggccgagcttggcgcgctgacccaggccaacccagcagatacgtgccggcaagccctggaagctgatgcgttcgcgggccatgtccagccagttatgcaagtgcgcgtcgtccgggatcagctctttgactttggcgtcggtcttgtagatgtcctgcgggtcaccggacagtgccgcccagcggaacgggccgatgccacggcagaacagcgggcggatgtaggccgggacgaaacccgggaaatcgaaagcgttttccacgccttcttcctgggccatctggcggatgttgttgccgtagtcgaaagtcgggatgccttgtttctggaactcgagcatggctttgacgtgcacggccatggactgcttggcggccttgatcacggcagcgggctcggtcttggcgcgggcgcggtattcgtcccaggtccagcccgccggcaggtaaccgttgagggggtcgtgggcgctggtctggtcggtgaccatgtccgggcgtacgccacgcttgaccagttccggcaggatttcggcggcgttgcccagcagggcgatggagatggccttgccttccttggtgtacttggcgatacgcgccagggcgtcgtcgaggtcggtggcttgttcgtcgacatagcggctgttcaggcggaagtcgatgctgacctgctggcactcgatgttcagcgagcaggcgccggccagggtggccgccagcggctgggcgccgcccatgccgccgaggccggcagtcagtacccaacggcctttaaggtcactgttgtagtgctggcgaccggcttcgacgaaggtttcgtaagtgccctggacgatgccctggctgccgatatagatccagctgccggcggtcatctggccgtacatggccaggcccttggcatccagttcgttgaagtgttcccagctggcccagtgcggcaccaggttggagttggcgatcagtacacgcggggcgttgctgtgggtcttgaacacgccgaccggtttgccggattgcaccagcagggtttcgtcgtcattcaggttagtgaggctctcgacgatctggtcgtagcactcccagttgcgtgctgcacggccaataccgccgtacaccaccagttctttcgggttctcggccacttgtgggtcaaggttgttcatcagcatgcgcagcggcgcttcagtcagccagcttttggcggtgagcttgttaccgtgggcggcacggatttcgacgtcacggtattttgtaggcttggtcactgctaggactcctcggcgatcgatgcgcgaacatggatggtgcgaagcagagtcttacgcacacatctttacttgtacatacaagcatatgcaatcaagcggccaactttttcggcgaggcgtttggattttttggaaagcgcgtgtgagccttgaaaatcaaggtgtagaggcgtgatgaaatttcttacgggaggcgttagtggttgggcggggttatcgcgaaagcatggttttgcgccacgctggggcattcggtaacaaagtggtgcgcgctcaggaaacagctatcaagaacagcgggaaacaaatgtgggagggggcttgcccccgatggcgttgtatcagtacccgataggctggctgacacactgcaatcgggggcaagccccctcccacattttttaaccgagttgggtcagttcgataatacagctgcggccgctgacggcgaggtccagcaggccggtgttaccgtggatctgcaggcagtcgtgatggccgagcttgtggtccagcaccttcacttcatcagcaacgctgaacaccagcacggtctgcgcggtactgaagaaccgctgcacaccgtccacccattgcagcctcgcgtggtaacgctgtggcgagtagatcaggttgaagtcgcggatcggcccggtgatcaagcggcatgccacctggctgtcacccttgaacgcaaagggttgcagcggtaacaacccgcgctgctcttcgccatccacggtcagcaccatgccggcgccctggatcacggtgatgacacgctggtaaccggcaaaggtggaaaagccacccgactcagcgatatccgcaatcgacaagcgccagccaaagccatccagccctgcacctgcatcacgggtgatttcttcggtactgccgccgccgtttttccacggcatgcgcacgtactcggcggcgcgccagacttttacgctactcatttgctgaagcgtccttccaggctgtggcgggaaccggggtggatcaaacgcgcggcggtcaccggctggcggcccgaccaggtgcgccggcgaatcaacaggcacggctcgccgggttcgatctgcagcagtttgcactcggccgcatcggcgaggatggcttcgaccacatgctcgccttcggtcagcggcgccacctggttcaggtaggcgtagggcgtttgctgggtgaaatcctgttgcaggtattccggcgcgaccagggcgttgacgaaacggtcttcgatttgcacgggaatatcgttttcgaagtgcacgatcagcgagtgaaacacccgcccgccttcgcgcatctccagggcaacggcgcgctcggaaccggcagcctcttcacccagggtgatgacttggcaggtatgccggtgaccacgggaggcgatctcatcggcgatgttgtgcacctcgaacagcgccgactggctcttgggttcggcgacaaaggtgccgacgccttgcatgcgcaccaacaacccttcggcggtgagctcacgcagggcgcggttgatggtcatgcggctgaaacccagctggctgaccagttcgctctccgaaggcacgcggtaatggggcggccagttgccgttgagaatctgctggctgatcatctgtttgacgcgggcgtacaagggcgccggactttcgtccatgtgggcagccagcgaagagttggcgggcggagtcggcacagggaatccttgcagggggaaaagatgcatagattgccggagtttaccgagcaggcaaacgtctgtatatgtatatacaaataaacacacgaccggggtgccttgatcatgtccgctttctttgccgaacgcgcgctgctgcctaatggatgggccaatgatgtacgtcttgaagtcagcgccgatggcttgctgaccaacgttgaggccaatgccagtgcagagggtgcagaacggctgagaggcccggtgttggcgggcatgccgaacctgcattcccatgccttccagcgtgccatggcgggattggccgaagtggccggcaacccgaatgacagtttctggacctggcgcgacctgatgtatcgcatggtcggcaagatcaacccggaccaactccaggtcatcgcgcgccagctgtatatcgagatgctcaaggccggctacacatcggtggcggaatttcattatgtgcaccatgacgtcagcggccagccctatgccgatcgcacggaactgtcacggcagatcagccaggcggcggccagcagcgggatcggtttgacgttgttgccggtgctctacacccattcaggttttggtgggcaagcgccgaacgagggccagcgccggttcatcaacagcacggaaaactacctggacctgcaagcgcgcctcaagccgatcctcgccgcgcaaccggcgcaagcgctgggcctgtgcttccactccctgcgcgcggtcacgccgcagcaaatcagcgaagtgctgacggccagcgacaagacctgcccggtgcatatccacatcgccgagcagcagaaggaagtcgacgactgcctggcctggagcggcaagcgcccactgcaatggctatatgacaatatcgacgtcaatgaacgctggtgcctggtgcatgccacccatgccgatgccgatgaggtgacgcgcatggccaagagccgggcgattgccggtttgtgcctgaccaccgaggccaacctgggtgatgggattttcccggcggtggatttcctcgcacagggcgggcgcatggggattgggtccgacagccatgtgtcgttgagcgtggtggaggaattgcgctggttggaatatggccagcgcctgcgtgatcagcggcgcaatcgtctgtatcgcagtgatcagccgatggtcgggcgcacgctgttcgatgccgcgctggatggcggcgcgcaggcgctaggccagctgattgggcggctggaagcgggcaagcgtgcggattggattgtcctggacggcaatgatccgtacctggcgacggcgaccgaggacgggattctgaatcgctggttgttcgccggtggtgatcggcaggtgcgggatgtgctggtgaatggagagtgggtggtgcgcgatgggcatcatgccggcgaagaagaaagcagccgagcgttcacacaggtcttgaggcatttactcggttaaaaacggtgggagggggcttgcccccgatagcgatgtatcagaatcagatgtgctgactgacacactgcaatcgggggcaagccccctcccacaattggatcggtggtgatccagacttattgcgaagtcttcgccatctgcttgtccgacgtacgccagatcaaccgtgtggtgtcatacccctgttgccgcgccctgctcagcaggtcttcgcgggtgtccgcattgaccgtcggcgtgcgtgacaggatccacatgtagcgtcggctcgggctgcccacaatggcggtcttgtagtcatcgctgacatacagcacccagtaatcgcccttggcgacgcccggcagcagcgaggtgaaccagttgttgaattccacccagagcttgtcggtcttgcccggcacttgcggggtggcggtgcccttggcttcttcccacttccactcggtcgtcaagcagcggttgaacaccgacatgtcgccgtcaggcaacagggtgtaacgggcttcggactgcgcacagttgcgctggaagtacatcggcaatcgggccaactcataccaggtgccctggtaacgcttgaggttgacgttgctcgctgtcttgggttgcagatcatcgccagaatggctggcacagcccgccaaaaacaggctggcacaaaggaacaaaacaaaacgcatcattcttcttctcccgcaggcttgcgccccggtttacttcaggccttgcccggaaaacatcagaaccttgtcaccggcatattgaacgctgataaagctgtttttatcgccccaggtgcaactggacatacccagtgcgccggaacaatcggtcggcttgcccaacaatgactccacctcagccttggccatgccagccgacaatttttgatagttttcttggttgaccttgctgcaagcggccaacagcacgcaaaaagccagcaacgcgagacggcgtaacgacatggaaacactcctggagggacgaagcagcgtgggtatctgccagaagcttagaagggaaaagaggtgtctggttcccgatgagcaaaaacaaaaaagccccgaaaacgctgaaacgtttcggggcttcttcaagggtgaaccggctcacaacaacgccggtcacttgtcgccgcagcttacttcttgtggtaagcggtcacgcgctcaacttcttccttcgaacccaggaacaccgccacacgctggtgcaggccttccggctggatgtcgaggatgcgctggtggccgtcagtggacgcaccgcctgcctgctccaccaggaacgacatcgggttggcttcgtacatcaggcgcagtttgcccggcttggatggctcgcggctgtcgcgtgggtacatgaacaagccaccacgggtcaggatacggtgcacgtcggcgaccatcgcggccacccaacgcatgttgaagtttttcttcaacgggccttcttcgccttccatcaactcgttgacgtagcgcttcaccggttcttcccagtggcgctggttggacatgttgatcgcaaattcctgggtcgatgcaggaatggagatgtcttcgtgggtcagtacgaagctgcccatttcacggtccagggtgaagcctttgacgccatcacccagggtcagcaccagcatggtctgcgggccgtagatggcgtagccggcagccacctgctcggtgcctggctgcaggaaggccttttcgttcagcgcttcgttctggctcaggtattcgttcgggcaacgcagtaccgagaagatggtgccaaccggtgcgttgatgtcgatgttggacgaaccgtccagcgggtcgaataccagcaggtacgcgcctttcgggtatttgccggggatctggtaggcattgtccatttcttcggacgccatgccggccaggtgaccgccccattcgttggcttcgagcaggatctcgttggacaggacgtcgagcttcttctgcacttcgccctgcacgttttcagtgcccatgctgcccaggacaccacccagtgcgcctttggacacggcgtggctgatttccttgcaagcacgcgccaccacttcgataaggaagcgcagatcggcaggcgtgttgttgctgcgggtctgctcgatcaaatagcgactcaaggtaacgcgggacatgtaaggctccggagaatggggggcttgaaaacccgcgcagtttaacgcgagtcggggcgtatttcctcctatcagaggatttaaacccaatagagttcatggactttatttaacgtgccgccggcggcttgcgcagcaaactgtaggccatggcgcccagtgccgccacgccgagcagcagcacggcccagagcccgagctttttccagttcgtcccggcatcggcagcgcctaccaccgcaaccggcgtgaccgcgacttccccggcgaccttggcctgccccagcgtcttgaagcgctcgggtttgtagtccgggatcagggtcgacagcggcaggcttgccgccttggccgacgcattgcccagcgccagcgtaaacggtgcctcaccccgcgccaggaacaccaactgcgtggcgcgcaccgcaaagcgcagggcgggcgcttcgacgcccaggccgccaccgcgctcatccacctgcaatttgagctcggccaccgtttgccccggcaactgcagttcatcctgcaccacgtcctggccattctgggtcaggcgatacagcaagccattgctcaatggttgccaggcctgcttgctgtcccttcgaccggataacgtcacgggcgccagcgtgttgggttgcttgagctcgatgcgcaagcgttcgagactcagccccgcaggcaactgccaactgtattccccggcgctgagccgcttacccgccagcggcggcgaccacaccaacggcagcggcacgctgctgcgggtagcgctcaccagcttggccgaggtcagcaacggcgccgcctggccctgccagaccagccgcaggtagcgcgccgattgcccgggcaagttcacgtcatgctgctcgacccgctcatcggcaaacgataagcgcgccacctgcccatcgccccaggcgtcccaatgctgcaagtcatcactggcctcgatgctgaaacgctggaagccctcctgctcgcggctccagtccaggctcaattgctgcaagggcgccttgatcgcactggcgtccaacacccagccacgcagtacttgcttgccgggttttggtgcgttcgagggtttgatttccaccagggtgccggtggtggtggctttcatcaccacctcgggcagggcttgctgggtgtcggcggcgtacagcgggaaccacttcacatcggtaacttcgcggctttcggtgcgctgcgacgcctggcgcgacaacgcataggcctggggctcgccggcggcgttgaacacccgcacatcggcgagatccgcctggcgcgcgttcaattgcaccgccagtggcaactccaggcgataccaagggccgttgccactgacgctcagcggcacctgggtggtgaagtcggcgggcgtttcctgcgcccacacggacaaggtcgtacacaggcccagcacggccacgctcaacttaccgatcaagaggatgctccttcagtttccaacaccgcttcggcgcgtttgggcggaagcggcgcaaagtagcccaccaccagcaacaacccgcccacgccgataaacgacacgatccgcgccaagccgccgcggttactcaattcgacaaagaacagcttggccaccaccaccgcaatcagcaccgcgccgatcagccacacttcgcggcgatggcgcaggtggccgccgatcatcaggccgagggcgatcagggtccagacgatcgacaggccggcctgcaccagcatcgactccagcaacgcatccaattgaaacggcacaccgccccaatggtgggccgtgcgcatcaccaacgcggtaaagaaggcaaacagcgaaagcccagcgacgccttgtgcgatcagctcggcacgcggcccgcgtagcggcgcgacacttcgtgcgcacacatacacgcccagcagcgcgaacagcaggcccaggtccagcgggttgatcagcggcacatagggcagcggcctggcggtgccatcgctgaagctgttcgccagccagaaccaaccgagcatcagcaccgccaatggcacggccgccaacactcgatattcccttgggtacgccgagaccggccatggccaatggcgcggcgcggcagccagcataaggtagagacttggcaggatcgcccagcccagccagcgccaggcgttgtattcggcagagaacctgagcagaccgtagcgcaactccagcgccagcatgccgatcagcatccagcagccgagcacgtgggccacgctcagcgccttggcgggaacgagcgtcgccaaacgccgcaacgagatgaaatgcaccacaaagaccgccggccacgccagccagccgtactgcgccgccgggtggtaataggtatgtgcgcacaccagcagcaccacgcccaccgccggcatcagcaacgtacacagcacgcccagcgacacccacttgaggcgcgaggccagcagcgcccaggtcgccacgctgatcgccgcgcatcccagcaggaacgcacccagcaattcctgcggaataaaccgcaacacttcgccagccagcgccaacgtccaccacgccgcgccccacaccaacagcacgtcggacaaccgctgcagcttcaacgcggcaaacaccggcgcatggggttcacgctgcaagcgccaggcgccgaccattgccgccaggcccagcaccatcggtgtccagaaaccgctgtgggccaacgggcgcagcccctcaccggacaacggcccgagcagctcgggcaccgccagcaggaacgaaccgccgccgaccacttgcagcagcaggccgaatacaaagctgacacgttgttgcaggtacaggctcagccagatgatcagcaaaccactggccgcccacacaccgctggcgctttcccacggcagcacgaacagcaccgcgaggttgatcaataccaggcccgccaacagcaccaccgacaacccgcgcaacagccgcacgtcactgcgcaccatggcgtcacgcgccgccagcagcatgccgccgatcaacgccaggccaaccagtgaagcggtcaacaagccgctccagcccgcattgaacaccgccgccccgtcgccaccttgcaaacgcaacaggaacaatgcgccgcccagcaattgcacagcgaacgcggtgaacaggaaggtgcgcgaaccgatacgcagcccgacgaacaacgttgccagcccggcaattgcccaactgacagccgtgccttgggtatccatcagcaagggggcaagcaggtacaaaaagctcaagcccaggctcgccagcaccggcaggcctctgcgttcccaatccgccacctgctcagtggatgccttgcgcagttgatcaaagctgaacagcagcgccgcacccagcaacagcgcgcccaacggcgcgccattcagcaagctgtgctcaccgatgcgcagctcactgaggaacgccagcgccgagcccagttgcaacaacaaaccgaaggcgcgtgccagcggtcgctgttgacgcaaaccgagccagaagatcccggcgccctccacggcccaggcggcagcggtccagcgcgcatctaggcccagcggaatagccaggctggcgaaaatcacgcccagggccaggcacgtctccgccagcaacaaggcgcgaccgccgctcaacagtcgcgccagtcccatgtaaataatgcccaggccgagggcgctgaacgccgcggcaaactccaggtgctgcaccagcgcaaactgcaagcccaaacccaccagcggcgggccgaacagcatgctgccgtcgacataatcccccttggccgccgaccagcgcagcaacgcaccacggctgtcatcctcgggcgcgtcgcgcatctccaacaatttgcgccgggcgaacagcaagccgatggccaggtacatcaggaaaaacaggatcaggaacggctcggtgctccacagcagctccggcgtgtaggaacgcatgccccacgcaaaaccgataccaaaggtgccgacaaaaccgatcaggttgagcaggcgccaggccttgaaccaggcgatggcgaggatgcccgcattgagcagggcaaaatagctgaacagcgccacatggttaccagcgccggtggacgtcaggattggcgcggcaaagccacccagagccgccgcgcaggccaggcccagcgcatcctgggtaatcgccaggatcgccgagaacacggtgacggcaaccaacaggccgagtgcggcactggggtcgatcaacgggtgcaagcgcatcgcggcaaacaccgtcaggtacagcacggcaatcccggtgccctgcagcatcaagccgtaattgctgttgcgcagccgcagccaccagcccaggcccagcaggcccaacgccgcagcggctacgccggcataacgcagctcgatcggcaccaccatgccttcggtggcgtaacgcagcaggaatgccaggccgaggaacagcagcaccacgccgacgcgcagcacggtattgccgccaaacagccaattgcgtgcgccgctgagggcacgctcgatgaggttggggccacgcgggatggcaggctcttcaggggacggcgacggaaccggagcccaaacatcatcgggcagcggctggctcggttcggcgaccatggccacgggcgtcagctcgacgggtaactcccaaaccagctcgggcgcttcgacgacaggtgcgggctcgacaatggcgggctcgacaaaaaccctggcagctgcgggggtgggcacttccaattgccgcaggcgctcacccagcgctatcagcgacttctgcgtggtttccaactgacgcgcctgttggtccgcctgggacgatagcttcgccaggcggatcgcctggccaatgcccagccccaacagcgcaccgatgcccgcatcgctgaacgactcatcgagcgtccagccgagcaccaagccaatcagcatgaaaatccattgcatggtcgatattccctaggcaaaccggcgcccagtatatcgacgcgcgcccaatgtgggagggggcttgcccccgatagcggtgtaccagtcgacatatctgcaaactgacaggctgctatcgggggcaagccccctcccacatctttggatcagcgatgtttagtcgagggctttccagatctcggtcgcgtactccctgatggtgcggtccgagctgaaccaacccatccgcgccgtgttcagcaccgccgaacgccaccacgccttggaatcatgccaatgcgcctcgacccgtgcctgggcgtcccagtacgaatcgaagtcggcgcataccaggaaacggtcgtaatcgaccaacccgtcgatcaaccccacatagcggcccggatcatccggcgaaaacaccccgccccggatcgcttgcagcacatcgttcaatcgatgggaggcggcgatgtccggcccggcgttgaactccccggcatgcttgcgggcttccacctgttgcgcgctgaggccaaagataaacatgtgctcggcacccacgcgctcatgcatctccacgttggcgccgtccatggtgcctatggtcagcgcgccgttgaggccgaacttcatgttgctggtgcctgaggcttcgaagccggcggtggaaatctgctccgacaagtccgccgccggaatgatgctttccgccaggctgacgttgtagttgggcaggaacaccaccttgagcagaccgcgcacggtcgggtcgttattgaccgtgcgggcgatgtcgttggtcagtttgatgatcaacttggcctggtggtaactggccgccgccttgcccgcgaagatcttcacgcgcggcacccagtcggtgcccggttcggcacggatcgcctggtacagcgccacggtatgcagcaggttgagcagttggcgcttgtattcgtggatgcgcttgacctgcacgtcgaacatcgccgccgggttgaccgcaatgcccaggcgctcgtggatgatgtcggccagtgcacgcttactgtgcaaacgttgttcggcaaacgccttgcggaacgcctgtttctcggcaaacggctccagctccaccaatcgctgctcgggcttgtcgagaatgtccggaccgagcgcctccaccaacatggacgtgagcttggggttggcctggtacaaccagcggcggaaggtaatgccgttggttttgttgttgatgcgttccgggtacagcttgtgcagttcggagaacaccgtgctgcgcatcagttgggtgtgcaagccggatacaccattgacgctgtgggagccgaggaacgccaggttacccatgcgcacacggcggccgttgtcttcttcgatcagtgagacggcgcgcagcacatcgaaatcgtggatacctttggcgcgcagcgaatcgatgtgctgggcgttgatcaggtagatgatctgcatgtgccggggcaacatgcgttccatcaagcctacaggccaggtttccaatgcttcgggcaacagggtgtggttggtgtaggaaagggtttcaacggtgacgtcccaagccgcttcccacggaatatcgtgcaaatccaccaactgccgcatcaactcggccacggcgatggacgggtgcgtgtcgttgagctggatcgccgcgtgttcgcccaggctcagtactgagccgtgcatgttcttgtgacggcgcagcaagtcctgcaacgaggcggagacgaagaaatattcctgacgcaggcgcagttcctgccccgcttcggtgctgtcggccgggtaaagcacccgggagatgctttcggcacgggccacttcggcgacagcgcccaggtggtcaccggcgttgaagcgctccaggtgcaggtcttccaccgcacgcgcgcgccacaggcgcagggtgttgacgctggcgccgcgccagccgactaccggcgtatcgtaggccacggcccgcacggtttcgttgggcgaccacacctggatcatcttgccggaggcgtccgccagggtttcgacgctgccgccgaagccgatcgggtaaatcacttcggcccgctcgaactcccacgggttgccgaaatccagccagcgctcggtctgctcctgctgccagccatcgactatcgcctgacggaacaacccgtgctcataacgaatgccataaccatggccggcaatgcccagggtcgacatgctttccatgaagcacgcggccaggcggcccaggccaccgttgccgagcgccgcgtcgggctccagcaggcggatgcgctccaggtcgacacccagctcggacagcgcttcgcgcgcaatctccagcacgccgaggttgctcaggctgtcgtagagcaggcggccaatcaggaactccagggagaggtagtaaacgcgtttctggcctttgcggtagatacgccgcgtatggttcatccagtggtcgaccatctggtcgcgggcggccagggcaatggcttcgaaccagtcatggtcgaaggcgtgatccgggtccttgcccaccgcgtaggtgagtttggtcaagacggcatcgcggaatgcggctacctctgcttctcgtgcaagtggttcctgagacatcaattgcgacctcgggcgagatagaaggagttgctagagcctagacggtctgacagacggtagacgcgctggttcggcagttttttaactcattcaccgttgcgtgaattagatgcaggggtcgtgcccgatcagcctttgagctgaaacccagaaaatattgttcaaaaaatcaccaatcccggtatgatcgcgcgcccggatacagccccaccttttggaaccctgatgaagcctcaattgatcgccgccgcggaactcgaccgtcttgaaacgtggcagaaatattccgcgcatatgtgcggtggttgcgtgtccagctgctgcacgctgccggtcgaagtgaagatcaaggacctgatccgcatcggtatcgtcgatgaattcgagcgtggcgacccgccgaagaacatcgccaaacgcttgcagaaggaaggcatcgtcgagcgcttcaattccaaatccgagatttttaccttgcagcgcatgagcaacaacgactgcctgtacctggatcgtaagacgcgcttctgcactatttatgacaagcgcccggacacctgccgcaaccacccgaaaatcgggccgcgtccggggtattgcgcgtacaagccgaaggaagtggtgcgcgagaccaagttcaagaccctcgacaagttctgatccgggttttgtggggctctcaagggcctcatcgggggcaagccccctcccacacttgaaagtgttcacagttcaaaatgtgggagggggcttgcccccgatagggccggcacagtcaccacaaaacctacagccataaaaaaacgcccccggcctttcgaccgggggcgttcttcattcagccagagttaactcagttcttggctttcttggcagcgcgggtacgctcgccttcgtccaggatcttcttacgcaggcggatcgacttaggcgtaacttcgcacagctcgtcgtcctggatgaattccagggcctgttccagggtgaagcgaacaggtggaaccagagcgatggtttcgtctttacccgaagcacgcatgttgtcgagcttcttgcctttggttgggttgacgcccatgtcgttgtcacggctgttcagaccaacgatctgaccgttgtagatctcttgaccgtgttcaacgaacagcttgccacgtgcctggagggtttccagggagtaggtcagtgccttgccggtttctaccgataccagaacaccgttctgacggccggacatgtcgccggacttcatggtgtcgtagcgatcgaagatcgaggtgaggatgccagcaccgttggtcagggtcaggaactggttacggaaaccgatcagaccgcgagcagggatgttgtattccagacgcacacggcctttgccatccggcaccatgttggtcaggtcgcccttacgcaggcccatctcttccatgaccttgccctgggattcttcaggggtgtcgatggtgacgttttcgaacggttcctgcttcacgccgtcaacttgacggatgatcacttccggacgaccaacgcccatttcgaagccttcgcgacgcatggtttcgatcagtaccgagaggtgcagctcaccacggccggataccttgaacttgtcagccgagtcgccttcttcaacgcgcagtgcaacgttgtacagcagctctttgtccagacgttccttgatgttacgggaggtcacgaacttgccttctttaccgcagaaaggcgagtcgtttacctggaaggtcatggaaacggttggctcgtcaacggtcagaggcttcatcgcttctaccgcgtccgggtggcacagggtgtcggagatgaacagcgagtccatgccgctgatgcacacgatgtcgccagctgctgcttcttcaacgtcgatgcggtgcaggccgtggtgacccatcagcttcaggatacgaccgttgcgcttcttgccgtcggcgccgatagcgacaaccggggtgttcggcttgacgcgaccacgggcgatacggccaacgccgataacacccaggaagctgttgtagtccagtgccgagatttgcatctggaacggaccgtcacggtcaacagccggcgcaggtacgttgtcgacgatcgactggtacagcggggtcatgtcttcagccatgtcggtgtggtccagaccggcaataccgttcagggccgaggcgtagacgactttgaagtccagctgttcttcggtggcacccaggttatcgaacaggtcgaagatctggtccagaacccagtccggacgcgcgcctggacggtcaaccttgttgatgcacacgatcggacgcaggccggcttcgaaagccttcttggtcacgaaacgggtttgcggcatagggccgtcttgagcgtcaaccagcagcagaacggagtcaaccatcgacattacgcgttctacttcgccgccgaagtcggcgtggcccggggtgtccacgatgttgatgtggtagccgttccagttgatggcggtgtttttcgccaggatggtaatgccgcgctctttttcctggtcgttggagtccatcacgcgctcgtcgttgagctcgttgcgctccagggtgccggattgacgcaggagtttgtctaccagggtggttttaccatggtcaacgtgagcaatgatggcgatgttacgtagattttcgatcacttgtgtatctcgatcagaggattcggtgtgctgacaggtcgtggcagcgattaacagtagagtcaggccttgccgttacagcttgacggcagagtcggggggccggtgacgcaggccacaggcaaacagccccgggctcttagctcggtcgataaacgcgcacattggcatgcccctcactgagcaaatggtgggcatgcaggcgactcatcacgcctttgtcgcaatacagcaggtactgacggctgttatccagttccttgaaacgcgcgttcaatgcatagaacggcagcgtttgtacgtcgatgccggcgatttccagcggctcatcctcagcggcatccgggtgacggatatcgatgacgatctggccggccagggcttcgctgacttcttcgatcttcacatcctggcccagttcgtcgatcacgcgatcgatcgggaccagcttggcgttctcgagcgcacgctccaggatcgccatgtcgaattctttctcttcatgctccacgcggtgacgcttggcgtgggtcttggggttcaccgagatgaccccgcagtactcaggcatgtgcttggcaaagtcggcggtgccgatctgctctgccaggtcgatgatgtcctgcttgtggctggcgatcagtgggcgcagtaccagcttctcggtaacgcaatcgatgatcgacaggttcggcagcgtctggctcgatacctgggagatcgcttcaccggtgaccagcgcgtcgatctgcaactggtcggcgatccgcgaggcagcgcgcaacatcatacgcttcaataccacgcccatatgaccgttatcgactttgccgagaatttcgcccagcacttcctcgaacggtacgctcacaaatagcacgcgctgggagctgccgtacttcttccagataaagtgcgcaacttccatcacgcccaattcgtgtgcacgcccgcccaggttaaagaagcagaagtggctcatcaggccgcgacgcatgatctggtaggccgccaccgtggaatcgaaaccgccggacatcagtaccagggtctgttccagggcgcccagcgggtaaccgccgatgctgttgtgctggctgtggatcacaaacaaccgttggtcgcgaatttccatgcgcacttcaatttgcggtgctttcagggaaattccggcggcgccgcactcgcgacgcagcttgctgccgacgtatttctcgacatccatggagctgaagctgtgcttgccggcacgcttgcagcgcaccgaaaagatcttgccttcaagctcactgccatagtgctgtttgcacttctcggtgatgtcgtcgaagtcgcccaacgggtactcatcgacctgcaggaaatgcgcgatgcccggcatgcaactcaggcgctcggtcatgtccttcaaggctttgggctcggtgacacgggtttccagctcgaggttgtcccacacaccgttcaccaccacagccgggtccaagtcacggagcacggcacggatgttcttggccaactgacggatgaaacgcgtccgtaccggtcggcttttgatggtgatctcggggaagactttaacgattaatttcatggaaacagcgcgcgccgggcctgctgaaaaaggggggcgcggattatagcggaaatcgctcaaggtttaaccagttaatatgcatcgcaagcgcaacgcactaaagaggtgcatttacgcgtccttgcgctacattgcggtgcgctatttttgggcttttgtcgcaatgcacctttataggggcgtttttggagcagaaaacccatgttggcgcactggcatgcaatttgctctcttgtgaggcaggttgccatggcggagtatccgcgccggcatcacccacattctaagggctaactccactaccccagcccgaagccacccggaggacactatgtcgaagtcggttcaactcatcaaagatcatgacgttaaatggattgatctgcgcttcacggacaccaaaggcactcagcaccacgtgaccatgccggctcgcgacgcgctggatgaagctttcttcgaagaaggcaaaatgttcgacggttcctccatcgccggctggaaaggcatcgaagcctccgacatgatcctgatgccggacgacagcactgccgtgctcgacccgttcaccgaagaagccaccctgatcctggtgtgcgacgtgatcgagccttcgaccatgcaaggctacgaccgcgacccacgtgcgatcgccaagcgtgccgaggaatacctgaagtccaccggtatcggtgacaccgtattcgtgggcccagagccagaattcttcatcttcgaccaagtgaagttcaagtccgacatctccggttccatgttcaagatctactccgaacaaggctcctggatgtccgaccaggacgttgaaggcggcaaccatggccaccgcccaggtatcaaagggggctacttcccggttccgccgttcgaccacgaccacgaaatccgtacctccatgtgcaacgccatggaagacatgggcctggtcatcgaagtgcaccaccacgaagtggccactgccggtcagaacgaaatcggtgtgaagttcaacaccctggttgccaaggctgacgaagtacaaaccctgaagtactgcgtacacaacactgccgtggcttacggccgtaccgctaccttcatgcctaagcctctttacggcgataacggttcgggtatgcacgttcacctgtccatcgccaaagatggcaagaacaccttcgctggcgaaggttatgccggcctgtccgacaccgccctgtacttcatcggcggcatcatcaagcacggtaaggccctgaacggcttcaccaacccgtcgaccaactcctacaagcgtctggtcccaggtttcgaagcaccggtaatgctggcctactcggctcgcaaccgttccgcttcgatccgtattccttacgtgtccagcccgcgtgctcgccgtatcgaagcccgcttcccggacccagcagccaacccatacctggccttcgctgccttggtcatggccggcctggatggtatccagaacaagatccaccctggcgatgccgccgacaaaaacttgtacgacctgccgcctgaagaggccaaagagatcccacaagtgtgcggcagcctgaaagaagccctggaagaactggacaagggccgtgcgttcctgaccaaaggcggcgtgttcagcgacgacttcatcgacgcttacatcggcctgaaaagcgaagaagaaatcaaggtgcgtaccttcgtacacccactggaatacgagctgtactacagctgctgatccggtagcgctgcgtccttaagagcggcgtgacgaaaaaagacctccctcgggaggtcttttttttgcctgggatttagcgggtcggggcatggcggtcgagcatctggccgaccatctgcgtgcccaacgcactcagttggtgaatggccaaggtggtgtcacggtgcttgccgcccaagtcctcggataaatccagcaacagggcgctgaccgaggtgagggtttcgaaggtattgatcatcaaggcttcgtcgtcgatatcggcggcgatggtgaagacagagggtggtggattgggggttggcttgaacatgtcttaacttcctcaagtgaggccgccatcgactcgctactaaacgttagggtggcggctgtgcgcaggttagtagaccggggaagttaagcaaaagccggcgcacccgaagatgccctacacacagccaccataaagaacggtgcggtacgagcttaacttaaccctcaggctactaaacctgatcgcttatgagcagcgaccgagcaaccttagagacgacaagccagccgtacaagccggcggattctggcgtaactgtaggcaagcacgcaagttaaggtagcctctgactgacgccgctgtagacctgcaaaccccattaaaatgtgggagctggcttgcctgcgatggcatcagctaggtatacctgatgcatcgagttgcccgcatcgcaggcaagccagctcccacaggagatcgcctttgaaacatcgatttgtgttcgctctgttatttgtcagcgtcagtgcgagtgctgcgccgcccactctggagccccttctcaacagcgtcgccgaacgcctggagatcgccgaccaggtagccctcagcaaatgggacagccacaagccggtagaggacaaaaagcgcgaacaagaagtgatcgccagcgttgtcgcccaggcaccgggctacaacttggcacctgccgccgttgagcagtttttcgcggcgcagatcgaggcgaacaagctggtgcagtacacccgtctgtcagactggcagttccagggcaaggcacctaacgatccgcgcccggacctggtgaaacagatccgcccgcagttggacgaactgcaaaaacgcctgctacagcaattggctgacttcaccccgcagcgcaccgatccgcagtgcccacaatggctggccgaagccgtgcatgagccgctgaatgatccgctgcgtcaactggcgatgatccgtgccacggccgagctctgcgttcgacctacctgatttgaggaaccgtcctgcatcgtcacctgggccgacagccatagcctgagcgttcactcaatgaacaggatggaaccatggacaccttcaagtgcttgatcgctgctgcggtaggcttgtcgttgctgggctgcggcacgcaggcaaaggatacggcacagatcgagaaagaggttttgcttgaacgcagcgagtcgtgggatggcacaccctacaaagcctacccctccggcccgccgcagctcacgctgattcgcctgaagatccctgcgcacacccaattgccctggcacacccaccccatgcccaacgccgcctacatcgtttcaggtgagctgaccgtcgaggcccgcagcagtggggctacgcgcaccttgaggcaaggccaaaccctggccgagatggtgagtaccgaacatcgcggcgtcaccggagacaccccggtggagcttttggtgttttacgcgggcacacaggacatgccgctgtcagagcagcactgaccctcccggatcattttcactcgcgctggaaacggtccgttcaccacttcctgaacaaccttcacaaaaccgcactatattggtgcgataggctgcacccttcccagctgtccagcccattttggttcgaaacttcccgagcaagctggcagaacgccacagtttcgcgccttaaacccccatttcagggctttcacgcttcttttcggagccttggtttggtttttgcattttccttgtatcagcgtgtgcctcaagcccgcgccttgctccaaaagaggtcctgatgaccatcagcgatgcactgcaccgtttgctactcgacaacctgaccaccgcgaccatcctgctcaatgacgacttgcgtcttgagtacatgaacccggcggcggagatgctcctggccatcagcggccagcgcagccatgggcagttcatcagcgaattgttcaccgagtcggccgaggccctgagttcattgcgccaggcagtggagcaggcacacccgttcaccaaacgcgaagcgatgctcaccgccctgaccggccagacgctgaccgtcgactatgccgtgacgccgatcctgagcaacggcgcgaccttgctactgctggaagtgcatccgcgtgatcgcctgctgcgcatcaccaaggaagaagcgcaactgtccaagcaggaaaccagcaagatgctggtacgcggcctggcccatgagatcaagaacccgctgggcggtattcgcggcgccgcgcaactgctggcccgcgagctgccagaggaacacctcaaggactacaccaacgtcatcattgaagaggccgatcgcctgcgtaacctggtggaccgcatgctcggctccaacaagttgccgtccctggcgatgaccaacgtgcacgaagtgcttgagcgcgtctgccaactggtcgaggccgaaagccagggctgcatcaccttggtgcgtgactacgacccgagcatccctgacgttctgatcgaccgcgaacagatgatccaggcggtgctcaacatcgtgcgcaacgcgatgcaggccatcagcagccagaatgagctgcgcctgggtcgcatcagcctgcgcacccgcgccctgcgccagttcaccatcggccacgtgcgccatcgcctggtgaccaaggtcgaaatcatcgacaacggtccggggattcctgcggaactccaggaaaccattttctttcccatggtcagtggccgcccggacggtaccgggctgggcctggccattacccagaacatcatcagccagcaccagggtctgatcgaatgtgagagccatcccggccacaccaccttctcgatctttctgcccctggaacaaggagccccatcgacatgagccgtagtgaaactgtctggatcgtcgatgacgaccgttctatccgctgggtcctcgagaaagccttgcaacaggaaggcatgaccacccagagcttcgacagcgccgatggagtgatgagccgactggcgcgccagcagcccgacgtgatcatctccgacatccgcatgcccggcgccagtggcctggacctgctggcgcggattcgcgagcagcacccgcgcctgccggtgatcatcatgaccgcgcactcggacctggacagcgctgtcgcgtcctaccagggcggcgcctttgagtacctgcccaagccgttcgacgtggacgaggcggtggcgctggtcaagcgcgccaaccagcacgcccaggaacagcagaaccaggaagcccctccggccctgacccgcaccccggaaatcatcggcgaagcgccggcgatgcaggaagtgtttcgcgccatcgggcgtttgagccactccaacatcaccgtgctgatcaacggcgagtccggcaccggtaaagagcttgtcgcccacgcgctgcaccgtcacagcccgcgggcggcttcgccgttcatcgcgctgaacatggcggcgattcccaaggacttgatggagtccgagctgttcggccatgaaaaaggcgcgttcaccggcgcagccaacctgcgtcgcgggcgctttgaacaggccgatggcggtacgctgttccttgatgaaatcggcgacatgccggccgacacccagacccgcctgctgcgggtactggctgacggtgagttctatcgcgttggcgggcacacgccggtcaaggtcgacgtacgcatcatcgcggcaacccaccagaacctggaaaccctggtacacgccggcaaattccgtgaggacttgttccaccgcctcaacgtgatccgtatccacatcccacgcatgtcggaccgtcgcgaagacatcccgaccctcgcccgccacttcctcagccgcgcggcccaggagttggccgtcgagccgaagctgctgaaaagcgagaccgaggaatacctgaagaacctgccgtggccgggcaacgttcgccagctggagaacacctgccgctggatcaccgtgatggcatccgggcgcgaagtgcatatcagcgacctgccgccggagctgttgagcctgccgcaggactctgcacccgtgaccaactgggaacaggcgctgcgccagtgggccgaccaggccctggcacgcggccagtcgagcctgctggacagcgccgtgccggcctttgagcggatcatgatcgagactgccttgaagcacaccgccgggcgccgccgcgatgccgccgtattgctgggctggggacgtaataccttgacccgcaagatcaaggaattggggatgaaggtcgatggcggggatgatgacgaggccgacgagggctaaaggtgcaccgcttcaatgcaccatgaactagcatcgggcacggatccaataccgaaaactccagcgctgctgaaaaaaccctgaaaaccaaaagcaccaaagccccgtattccggggctttgcgttttatacagattttttttggcacaacctggccactctggcacgcgccctgcaataacccctgtactacccagtttcggggaccttggtacaggcaggccgagaatcccctctttacacccggggcgctggatgcgaatcgcatcgcgctccacaccgtttcgggaacctcggtacaggcaggccggggattccctctttaacaccgaagcctttcgaggcttcaccccgttttgggagccctggtacaggcaggccgggaactccctcttttattcctcctggagatggatctccagccgccagcggccatcggccttctcgcccttccactccccacgcaacggccgagccgccaccaggttcagcaacaggccgccatcggtcttgcgtacgcgccagttcacgtctttgtcattgaccttgagtcgcccagccgcagccttgccctgggcgtcgaacaacagcgccacggtgccatcgatatgctcaccgtgcagcttgggctcgctgttgaaccacaccaccacgccgtccgctgcggtctcgacctgttgcagttcgaccgggtccggggtggtcaggcgaccgatcatcaggccgaccatcatgccgacaatcgccaaagaacccatgaccctcggcataagcttcggcctcgggtcctcttcgagggtagaatgcagcgcatctttgccttcggagccgtgcatgtttcacgtcatcctttttcaaccagaaattccgccgaataccggcaacgttatcaggctgtgcgccaacagtggctgccacctgcatttgatcgagccgctgggcttcgacatggacgacaagcgcctgcgccgcgccgggctggattaccacgagtacgccacgctcaagcgccacgccgatctggccagttgcctggaaagcctgggccacccacggctgttcgcgttcaccaccaagggttcgcggccgttccatgatgccagttttgccgagggcgatgccttcctgttcggccccgaaagcaggggcctgccggccgaggtactcgacgccctgcccgacggccatcgcctgcgcttgccgatgcgcgaggggtgccgcagcttgaacctgtccaacaccgtggctgtcgcggtctacgaaggttggcgccagctgggcttcaagtaacacacataacaaatgtgggagggggcttgcccccgatgacggagtaccagtcgatatctatgtgactgatctaccgctatcgggggcaagccccctcccacatggggtcctgcaccgggttcgagattactgaaccgtcgacgagccttcctgttgcatgcgctgcagctcttgggcgtacagggcatcgaagttcaccggcgccagcatcagcgcggggaacgagccacgggtgaccaggctgtccagggtctcacgggcgtacgggaacaggatgttcgggcagaacgcgcccagggtgtggctcatggaggcttcgtccaggccctggatcaggaagataccagcctgttgcacttctgcgatgaaggccacttcttcgccgttcttgacggtcacggacagggtcagcaccacttcgtggaagtcgctttccagcgccttctggcgggtgttcaggtccagcgcaacgcttggggtccattcctgacggaagatggccgggcttttcggcgcttcaaacgacaggtcacgcacgtagatgcgctgcagcgagaactgtggagctggggcttctgctgcttcggtgttctgttggtcagtcatctcagatccttgtgatcttggggtcttttagggtttaaggagtcagacgagcagcagcgcatcgagtttaccggcgcgctccagggcgaacaggtcgtcgcagccaccgatgtgcctggcgccgacccagatctgcggcacggacgtgcgccccgccttctgggccatttcggcgcgcacctggggtttgccgtcgaccttgatctcttcgaaggcgacgccctttttctccagcaaggccttggcccgcatgcagtaagggcaccaatcgctggaatacacgacaacctgactcatatcacttcaccagcggcaggttatcggcgcgccagctgctgatgccaccggacaacttggcggcggtgaaaccggtcttgagcatttcgcgggcgtgggtgccggcgtgctggccttgggcgtcgaccaggatgatggtcttggccttgtgcttttccagctcggccaggcgcgcgatcagcttgtcctgcggaatgttcagggcgccgacgatatggccggtggcgaaatccttggccggacggatgtccacgacaacggcctcatccttgttgaccagcgcggtcagctccgccgtgctcaggctgcggccaccgcggctcaattcgtgagcgatcaacagcgccagcaggatgacgaaggcacccacgagcagatagtgggcagtggcaaatgcaatcaggtgatcaaccatcaaggaggttccagggcgttaaaatggcggtaagtatacacagccgtcagggggggccaacccccgtaaagcggtgacgtggtcggaacttcgctttaaactgccactcccttttcaattgtcttcctttattaccgccacgagaggatctatgactactacgcctaaacctttggtcctgataattctcgatggcttcggacacagtgaaagccaccacgacaacgcggtatacgcggccaagaagcctgtactcgaccgcctgaccgccaccgtacccaacggcctgatctccggctcgggcatggacgtgggtctgccggacggccagatgggcaattcggaagtcggccacatgaacctcggcgccggacgagtggtataccaggacttcacccgtgtgaccaaagcgatccgcgatggcgagttcttcgagaacccgaccatctgcgcggcagtcgataaagcagtggctgccggtaaggccgtgcacttcatgggcctgctgtccgatggcggcgtccacagccaccaggaccacctggtcgccatggccgagctggccttcaagcgcggcgccgacaagatctacctgcacgccttcctcgacggccgcgacaccccgccgaaaagcgcgcagtcgtccatcgaactgctcgacaccaccttcgccgccctcggcaaaggccgcatcgccagcctggtgggccgttacttcgccatggaccgtgacaaccgttgggaccgcgtctcccaggcctacaacctgattgtcgacggccaggccgaattcaatgccgccaccgcccaggaaggccttgaagctgcctacgcccgtggcgaaagcgacgagttcgtcaaagccaccaccatcggtgagccggtcaaggtcgaagacggcgacgccgtggtgttcatgaacttccgcgccgaccgcgcccgcgagctgagccgcgtgtttgtcgaagacggcttcaaggaattcgagcgctcccgccagccgaaggtgcagtacgtgggcctgacccaatacgccgccagcatcccggcccccgccgcctttgccgccagcagcctggacaacgtgctgggcgactacctggcaaaaaacggcaagacccagctgcgcattgccgaaaccgaaaaatacgcccacgtgaccttctttttctccggcggccgtgaagagccgttcccgggcgaagaacgcattttgatcccttcgccaaaggtcgccacctacgacctgcaaccagaaatgagcgcgccggaagtcaccgacaagatcgtcgacgccatcgacaaccagcgttacgacgtgatcgtggtcaactacgccaacggtgacatggtcggccacagcggcaacctggaagctgcgaccaaggccgtggaatgcctggacctgtgcgtcggccgtatcgtcgacgcgctggaaaaggttggcggcgaagcgttgatcaccgccgaccacggcaactgcgagcagatgtccgacgaatccaccgggcaagcccataccgcccacaccaccgagccggtgccgttcatctacgtcggcaagcgtgatttcaaggtgcgtagcggtggcgtgctggcggatgtggcgccgaccatgctgatgctgatggggctggagaagccggtggagatgaccgggacttcgattctggtctgattccagcttcaccgaaaaacaatgtgggagggggcttgcccccgattacggtagatcagctgacacctatgtggctgacacactgcaatcgggggcaagccccctcccacattggatctgcgcagtttggaacatgtctttttgccataccactgccactcggcacctatcttgcgctacagcccgaattgggcgttttttttgccgcgcttggcgggcatactaggccgtccatttccctggtgtcgcccgcctctatgcttcgcgccttgattacccttgctcttgtctgcctgctccaaccggcgtttgccgacgagcgtgcacaaacccaacaacagttggacgctacgcgtcaggacattaccgagctgaaaaaactgctcggcaagctccaggaagagaaatccggggtgcagaaagacctgcgcggcacggaaaccgagatgggcaagctggagaagcaggtccaggagctacaaaaagaattaaagaagagcgagtcggaactggagcgactcgacgctgagaaaaaaaaactccagagcgcacgcgttgaacagcaacgcctgatcgcgatccaggcccgtgccgcctaccagaacggccgccaggaatacctcaagctgctgctcaaccagcagaaccccgagaaattcgcgcgcaccctcacttactacgactacctgagcaaggcccggctggagcaactcaaaagcttcaatgaaaccctgcgccagttggtcaatgtcgagcaggaaatcgccaatcagcaatcccagttgcaagaccagaaagtcgccctcgacacccagcgcagcgagctggacaaggtccgcaaggagcgccaactagcgctggccaagctcaatgacgacgtaaaggcccgcgacgccaagctccaggcgcgcgagcaggaccaggctgacctggccaaagtgcttaaaaccatcgaagaaaccctggcccgccaggcacgcgaggccgaagaagcgcggcagaaagcgctgatcgcccagcaagaagccgaaaaaaagcgccagcgtgaggccgaactggccgccactacggataagccggcaccgcgcaaaccggcgcatgcggcgcctggcccactggtttccagcgccggcgagtcgttcggcgggccttttgcttcagcccgcggcaaacttccatggccagttgatggtcgattgctggcacgctttggggaaacccgtggtgatgacacccgcgccaagtgggatggggtgatgatcagcgcctccgctggcagccaggtccacgcggtccacggtgggcgtgtggtgtttgccgattggctgcggggcgccggtttattggtgattctcgaccacggtaatggctatttgagcctttacggccacaatcagacattactcaagtcggcaggtgatgttgtaaaagccggtgaatccatctccactgtgggtaacagtggtggccaggacaccccggcgctgtacttcgctattcgtcagcagggtcgcccaagcgatcccgcacaatggtgccgttcccaaggatagggccgcatctacattaggagttcgttcgacatgcagcatttgtcccgcctcacatcgctggccctgacgatcgccctggtgatcggtgcgcccctggctttcgccgaccaggctgccccggcggccccggccagcacggccgcgaccaccaaggcgccgctgccgctggacgagctgcgcacctttgccgaggtcatggaccgcatcaaggccgcgtatgtcgaacccgtagacgacaagaccctgctggaaaatgccatcaagggcatgctcagcaacctcgacccgcactccgcctacctgggccctgaagacttcgccgagctgcaggaaagcaccagcggtgagttcggcggcctgggcatcgaagtcggcgccgaagacggcaacatcaaggtggtctcgccgatcgatgacaccccggcgtccaaggccggcatccaggccggtgacttcatcgtcaagatcaacggccagccgactcgcggccagaccatgaccgaagccgtcgacaagatgcgcggcaagatcggccagaaaatcaccctgaccctggtgcgcgacggcggcaacccgttcgacgtgacgctgacccgcgcgaccatcgtggtcaagagcgtgaagagccagctgctggagtcgggctacggttacatccgcatcacccagttccaggtcaagaccggcgacgaagtggccaaggccctggccaagctgcgcaaggacaacggcaagaagctcagcggtatcgtgctcgacctgcgcaacaacccaggcggcgtgttgcaggcggcggtggaagtggtcgaccacttcatcaccaaaggcctgatcgtctacaccaagggccgcatcgccaattccgagctgcgcttctcggccaccggcaacgacctcagcgaaaacgtgccattggccgtgctgatcaacggcggcagcgcctcggcttcggagatcgtcgccggtgccctgcaagaccagaaacgcggtgtgctgatgggcaccaccagcttcggcaaaggctcggtgcaaaccgtattgccgctgaacaacgagcgtgcgctgaagatcaccaccgctctgtactacacgccaaacgggcgctcgatccaggcccagggcatcgtgccggacatcgaggtgcgcaaagccaagatcaccaacgagatcgacagcgagtactacaaggaggccgacctgcaaggccacctgggcaatggcaacggcggcgccgaccagcccaccggcagcggcaagaaagccaagccgatgccgcaggacgatgactaccaactcgcccaggcgctgagcctgctcaagggcttgagcatcacgcgcagccgttgatatgcgttttgccctgatcatcgctgtgctgtgcagcctggccggggtcgcccatgcgaccccggccggcgagcctcaaaaagcctacctgaccctcatcatcgacgacctcgggcaaaacctgcccagggatcgtcgcgtgctggccctgcccgggccagtgaccacggcgatcatgcccgacacgccccacgccgccgaattcgcccgcgaagcgcacaaagccggcaagatcgtgatcctgcacatgcccatggacccggccaccggccctttcgcctggcacccggagctgcccatcgaagaactcggcaggcgcctggacgctgccttcaaggcagtgccctataccgccggcatcaacaaccacatgggcagccgcatgaccgcgcagccccaagccatggcctggttgatgggcgagttgcaacgacgcaacaagttctttgtcgacagccgcaccagcgccaagacggtcgccgccgcagaggcgcagaagatcggcctggccagcgtctcgcgggacgtcttcctggacgacgaacgcaccgaagcggcgattaccacgcagttgcagactgcaatcaagctggcgcacaaacagggttcggcggtgatgatcggccacccgtatccacagacactggcggtgctggaacgcgagttgcccaagctcaaggcccagggcatcgactggatcgatatcaagttgatgatcagcgtgcgcagcaaccaggccatggctggacatggcaaaaacggcaagtactagatagctaccgacctgcctacccggcactcctgaatagtcgagcctcacgctcacgctttcaggacactccatgaacacattccatcccttgattacagggctgctgatcagcagcctttccagcctgcttgtcgcggcaccaaaggactacggtgaaggccttgccaacgccagcccacccaaaatgctcaccaatgcgcagcaccagcacgcccattggactggcgtcggtcgtattcgcaacgaagcccagaccctatgcaccgccacgctgctcgacacccgcgacgaaaccggccagtccggcccggcttacgtggtcaccagcagccattgcctgcaccgcgtgaatggcgtcgtgcaaaaagatctgccgatgaaaggcagcatcagtttcaactacttcgacgacaccctcgaacgcatcaagacctacccgctcaagaccttgaagtggggcagcagccaaggcgtggaccttgcaatcatcgagttggacgccacgttgtcgagcctgctcaacaacggcataaccccggtaaaactggccaaggaagtgcccgccgacggcaacgacatcctggcactcgcggcgccggcgtgggacaccttgcatctttccgcgtgcacccaacaaacctcgcgcgaactggtggagcaacctttcgtgtggcgaatcaccatgaagaaccagtgcaagggcgtacgccttggcagctttggcggcccgttgctggaccgagcgtccaacacgctgttcggtattctcagcaccagcaccgccggccagtccgaagaacataaatgccaacgtgatgcgccgtgcgagatcctggacggcacgccgagctggcatgaagacaccaactacggcagcccggtcacgtttctcaaccggtgttttgtggccggtgttctgcaagcggatgtagaacagtgcgatctttttcctaccaccagcattacctttgagaatcccgagcctatccagcagtactacgtgaaaaaaccgggcgggcgcggcaaggacatcaccccgacctggaacctggcgttcaaggtgaacacgccgttttatcgctacaaaaccacccgccgtgccgccgaatgcgaaaacccggcgctgtacagcgcaccgattgacgcacgcggcgcacgcatcaacgacgccataggcccgcagaccgggatgcacatgctgtgcatcattggggtcgattccgccgaacacccagctaccagcggcatgatgcgcaatgccctgacccttgcggtagaactagcccagccgggcccggcgcgcactcccgacctgagcatcctcctcgacccttacacgctgcagggctacaccctggcctggaagttggcaccgccgttcatgagccgctacacctacaaatacggcccggctgccacgaccgattgcctgcgcccggtggattacctgcccattccccaccctcatgtacccgaggaggaggacgacgagccgatcgatatcgtgtacccacttaatgacgcgccgcagggggcaggtgataagttcgtgcgcctggtcagcgtgaatcatcagccggtcaaggtctgcacctatgccttcgaccaggccgaccaaccgtcgacattgcgggtcgatttgctcaaaccgcgttgagcgctagaggtagcgcgccatgatctcctcgacgtgaccgtctttgcgtaactggtccagcgccgcctgcagccttgccaccagatcgtccggcacgtctttattcaatgccaggtagagctgggcactgttaaaacgcagcaccgtcttgagcccggtcacacccacctgacgtgccaggtaacgcccggcggggtcgccggtggcccagaggtcgatctggccatccagcagcttttgcgcgttgtcttgatcgcgcaacacgacgatggggttcaggccctgcttctccagggtctgggcaatggcatcgcccttgtaggcgccgatcttgtagcggcgcgcgtgttcgaggtcgtccagttggatcttgctgtcggccttggccagcagcacccaatcgtccggaccgatggggccgacccatttgaacagcgcttcacggtccggcagtcgcgccatcacgaacacaccgtagcctggtttctccagggcgagcttatagatgcgctcccagggaaaacgcagggtgaggttgtaggagatgcccgcccgcttgaaggtttcgcgcacgatgtccacggcgatgccttcgatgttctcgtccttggcgaagttcttgccgtttttcgccatgttgtagggcgggaaattttccgtcagcaacaccagggaggcgtcggacggttcttcggcgtgggccggagcggtcaacaggagggacgtactggcgagggcgagcagcaggtgcttgaacatgaaagttaccggaatccatggcaagcgcagagagtgcctctggcctgccatgctgtccagcagcgtttagcgcacgacgataccgcgcgccgccatgtaggccttggcctcgggaacggtgtattcgccaaagtggaaaatactcgctgccagcaccgcactggcgtggccttcgatcacgccgtcagccaggtgctgcaggttgccgacgccgccggaggcaatcaccgggatgcccagcgcatcgctgatggcacgggtcacgcccaggtcgaagccgtttttcatgccgtcctggtccatgctggtcagcaggatttcaccggcacccaggccttccatcttcatcgcccactccaccgcgtccaggccggtcggcttgcggccgccatgggtgaagatctcccagcgcggggtttcgcccgggccggagactttcttcgcgtcgatggcgaccacgatgcactgcgaaccgaagtgctgcgcggcttcgccgacgaactcagggttgaacacggctgcggtgttgatcgagaccttgtccgcgccggcattgagcaggttgcggatgtcctgcacggtacgcacgccaccgcccacggtcagcgggatgaacacctggctggccatgcgctcgacggtatgcaacgtggtgtcgcggccgtcgacgctggcggtaatgtcgagaaaggtaatttcgtcggcaccttgctcatcgtagcgacgggcaatttccaccggatcgccggcgtcacggatgttctcgaacttgacgcccttgaccacgcgaccgttgtcgacgtccaggcaagggatgatgcgtttggccagcgccatggtcagtcctcagccgttgtaggcatcgcagtaagcctgggcttcggcgacgtccagggtcccttcgtagatcgcccggccggtgatggcgccgatgatgccgggtgccttggcatccagcagcgacttgatgtcacccaggttgtggatgccgccggaagcgatcaccgggatcttcgtcgccgccgccagcgcagcagtgaacggcacgttgcagccctgcatcatgccgtctttggcgatgtcggtataaacgatggcggagacgccgtcggcttcgaactgtttggccaggtcgatcacttgcacggtgctgatttcagcccagccgtcggtggcaacataaccgtccttcgcgtccaggcccacgatcactttgcccgggaacgcgcggcaggcttcggcgacgaacgccggatctttcaccgccttggtgccgatgatcacgtagctcacgccggccttgacgtagtgctcgatggtttccagggagcggataccgccaccgatctggatcggcaggttcgggtaacgcttggcaatggcggtgaccacttcaccgttcactggctggccttcgaaggcgccgttcaagtccaccagatgcagacgacggcagcccccttccacccatttggcggccatgctcaccgggtcatcggagaatacggtggagtcttccatgcggccttggcgcagacgtacgcaggcaccgtccttgagatcgatagcggggataatcagcatctggcaaaccttattcgatattcagcaatgcttgggaaatcagggtttctcaagcgaccacaggtcgctttcgatgctttcgaacctttctttaaggagcgtctgcgtgtcgaaaatcgccctgttgtaatagtgcggagccacttcggtggtgaacagttcaaggatctcggcgacctcgaacgaccccagcttgagctcgaagcgatcttccatgaaacgcttgatcttgagggtagcctcactctcctgttcaggcgtgaggttcaagaccggctgcttcggcttccgggccatttaccagcgcccgtcccaggcggcgaagttctgcagcaattgcaggccatgggtatggctcttctccgggtggaactgcacggcaaaccgcgagccttcggccagcgcagcggcgaagtcgacgccgtagtgcccgccacccaccacctggcccggtttgccggcggcgatgtaatagctgtgcacgaagtagaagcgcgccaggtccggaatgtcgtgccacagcgggtgatccacggtctggctgacctggttccagcccatgtgcgggactttcaggtgggcgccgtcttcatgcaggtccttgccgaagaacttcacttgcccagggaacaggccgatgcaatcgacgccgtcgttctcttcactgcggtcgagcaaggcttgcatgcccacgcagatgccgaggaacgggcggtcctggctgacttcgcgcaccaggctgtcaaagcccaggcggcggatctcggccatgcagtcgcgaatcgcgccgacgccgggaaacaccacccggtcggcttcgcgaatcacgttggcctcgctggtgatcagcaccttgccggcccctacgtgctcgagggccttggccaccgagtgcaggttacccatgccgtaatcgataaccgcgaccgtctgcattacaggacgcccttggtcgaaggcatttgcccggccatgcgctcatccagctccaccgccatgcgcagggcgcggccgaaagccttgaacacggtttcgatctggtggtgggtgttggtgccgcgcaggttgtcgatgtgcaggctgacaagcgcgtggttgacgaacccctggaagaattcctggaacaggtcgacgtcgaagccgcccacggtggcgcgggtgtagggcacgtgcatctgcaggcctggacggccggagaagtcgatgaccacacgcgacagcgcttcgtccagcgggacataggcatggccgtagcgacggatgcctttcttgtcgccgatggccttggcaaatgcctggcccaacgtgatgccaacgtcttccaccgtgtggtggtcgtcgatatgcaggtcgcccttgctgacgatatccaggtcgatcagcccgtgacgggcgatctggtccagcatgtgctcaagaaaaggtacaccgatatcaaatcgggcctttccggtgccatccaggttgatcgaggctttgatctgggtttccagagtgtcgcgctcgacggacgccttacgttcggccatcaccagctccgcaaaatcattgggcgaaaaaggcagccattataggggcgcgggcgctaaacagaaacatcgaaggggataagactgacgagttggagcgaggaatgtcggggatagacatgtgcatacatgtgggtacccgcttatgtggcgagcgggcttgccccgcgttgggctgcgtagcagccccaaaaccagccagcgcgttttaaccgagaaaacgcgttggcctcattggggtcgcttcgcgacccgacgcggggcaagcccgctcgccacaaaaagcgggtccctacaggtattgcatcagtggaacagtaccgccgttttctgcagggtcacccacacaccccacgccaacggaatacccactaccagccaggcggcaatcgccaacggcacggtacctggggctgctttccactccagggaggtggtcgcatccgcgcctttgtcatggcccagcgcctgttcggcggccagttcggcgtcggtcatgaagtacttgtccgccaccgggcgcaccagcaggttgcagatgaagcccagcaccagcaggccagcgaggatgtacaaggtgatgtcataggccgcagcgcgttcaacgccgatgctcagctgatactcacgcaggtagttcaccagcaccggacccaacacgccagccgctgcccaggcagtcaacaggcgaccgtggatcgcgccgaccatttgcgtaccgaacaggtcggccaggtaggccgggacggtcgcaaaaccaccgccgtacatcgacaggatgatgcagaacgccgccacgaacagcgccacgttgcccaggtgccccaggttcgggatcagcgcgtacagggcaaagcccagggcgaagaacacaaagtaggtgtttttacggcccaggtagtcggagaacgacgcccagaagaaccggccaccgatgttgaacaggctcagcaggccagtgaagcccgccgcaatggcggcgacggaggccagttgcccggcgtccagttggccgaacggcacatccaggcccagcaacttgccgccgaacacttcctgcagcaggggcgaagccatgccgaggatgccgataccggcggagacgttcaggcacagcaccagccataccaggcggaattgcggggttttccacgccacgttcacgtgcacgtgacggtgggtgatcatggcgttgctggcttttttcgccggtgcggtccagccctcaggcttccagccggtcggcggaacgcggtaggacaaggcgccaccgatcatgaacacgaagtagatcgcggccatcaccaggaagctctgccacacacccacgctggtaggcgtggcgaagtggcccatcaatgccgctgccaacggagcaccgaccatcgcgccaccgccgaagcccatgatcgccatgccggtggccatgccacgcttgtccgggaaccacttgatcagggtcgacacgggcgagatatagcccaggcccaggccgataccgccaatgaccccggagccgatccacatcagccagatctggtgggtatagatccccaacgccgaaatcaacaggccgccacaccagcacagcgccgaaacaacgcccgccttgcgtggcccggcatgttccagccagccgccccagatcgctgccgagcagcccaggaagatgaagaacagggtgtagatccagcccagcatggagatgggccagtcgcattgggacgaaaagacttgagcgataaagctcatgtccggcgcgcaggcgaccggtttggtgatacccagcgctttggacagtggcagccagaacaccgagaagccgtaggccatgccgatgcacaggtggatggccaaggcggccggcggaaccagccagcggttgaagccgggcttggcgataatgcgttccttggacaggaacgcaggctgcgcggcagatgaagctgccgcagtgctagtgctcattggtgtttcccccagttgttagtatgtgtccgtcaggcgctctctccctcggccttgcacgcaaagcgtggccgttttgttgagtgaagctccgttttaggcgcgacgttaagtcgcagaaggcggacgaacatgcagagattagcatctgtggatgacagaaaaaccaaactgccatcacctttttcaggaaatctgctttgtttgacgtcaaaaacccgtttcccgccccctggatacaatgtaacgatcggggcactgacgcaggccgtcgggcgttatactctgcggctaaattttgaaatcgacatacaaggactcgcccatgaaagcgttcggcaaaatcctgggtctggtacttctcgggctgttgctgatcattgtggccctgggctttgccctgacccacctcttcgatcccaacgactataaagacgagatccgccagattgcccgcgacaaggcccacatcgagctgacgctcaatggcgatatcggctggagcctgttcccctggctcgggctggaactgcacgaagccagcgtggcgaccctgaccaacccaaccaaaccgttcgccgacttgcagatgctcggcctgtcggtacgggttttaccgctgctgcgtcgtgaagtgcagatgagcgatgtgcgtgtcgaaggcctcaacctgcgcctgaaccgcgacaaacaaggccacggcgattgggaagacatcggcaagaacgccaatgagccgagcgctagcgcacccgctgccgtggaacaggccgccgagcccgagccggagaaaccctcgaaacctatccggctggacatcgacagcctgaccattaacaacgcccgcatcgaatacaacgacgagcagaccggcaagcagttcagcgccgaaagcatccagctgagcgccggcgctgtgcacgaaggtgccagtatcccggtgaaactcactgccttcttcggcaccaaccagccggtgatgcgcgtcaagaccgagctcaatggcaacctgcgcatccagcgcgccctcaagcgttatgagctggaagacatgaagatcaccggcgaagccacgggcgagccgctgcaaggcaagaccgtgaccttctccacccagggccaattgctggtggaccaggcggccaatatcgccgaatggaccaacctgaaactctcggccaaccagttgcgcgccctgggcgagctgaaggtcaacgacctggacaagaccccgcagcttagcggcgcactgtccattgcccagttcgacctggccaagttcctcgacagcgtcggccaccccctgccaccgatggccgagggcagcctgagcaaggttgaactggtcagccgcctcaagggcaccccgaccagcctggcactggaagacctgaacctgaaactcgacggcagcaccttcaccggtcgcctggcggtggacgatttcgccaaacagtccctgcgcgtgcagctcaagggcgatacgttcaacgccgacaactacctgccggccaagtccgaatccgccaagggtgcaagcgccgcacgccaggccgaggtgcagaacagcgaagccggcgccatggccgccggcggcaccacaccattgcccgatgcgccgaccaaaggcgcctggagcaccgacaagctgctgccattgacgcgcctgcgcacgctcgacgtggatgccgacctcgccttcggtcaactgaccctgagcaaattgccgatccagaatgcggcgctcaaggcgtccggcatcgatggccaactcaagctcgagaccttgagcggcggcctctacaacggcaccttccaggccaacggcagcctcgatgtgcgtcaggatattcctgtgctggcgctgcaaagccggatcaagcaggtgccggtcgagcgcatcctgcaggcccaggggcagaacccgccggtgaagggccagatcaccctggacagcaacctcacaggccgcggcaacagccagaaagccctgatcgacagcctcaacggcaccgccagctttgtgatcaacaacggcgtgctgctcaacgccaaccttgagcaacaactgtgcaccggcattgccctgctcaaccgcaagaccctgagcagcacgccgccaggcaaggacacgccgttccaggagctgaaaggcaacctggccttccgtaacggtgtagccagcaacccggacctgaaagtgcgcatcccgggcctgaccgtcaacggtaacggtgatgtggacttgcgcgtgctgggcatggactaccgcgtcggcatcattgtcgagggcgaccagcgcgaaacgccggaccctgcctgccaggtcggctccaacttccagggcatcgaagtgccgctgcgctgccgtggcccgctggagctgggggccaaggcctgccgcctggacaaggacggcttgacccaggtcgccatcaaggcggccggcaacaagctcagcgacaaactggaagagaagctcgacaaggtgaacccgcagttgaaagatgcattgaagggcctgttcaagcgatgagaaacgagcagttttcagaggccgtgctcaattggtacgaccgccacggtcgccatgacctgccctggcaacagggcatcacgccttatcgggtgtgggtctcggagatcatgctgcagcagacccaggtcagcacggtgctcaattacttcgaccgcttcatggcgtcattgccaacggtcgaagccttggccgccgcgccggaagatgaagtgctgcacctgtggaccggcctgggttactacacccgggcgcgcaacctgcaaaagaccgcgaagattgtcgtggccgagtacggtggcgagtttcccagggatgtcgaaaagctcaccgagctgcccggtattggcctgtccaccgccggcgcgattgccagcctgagcatgggcctgcgtgcgccgatcctcgatggcaacgtcaagcgtgtgctggcgcggtttaccgcacaggagggctacccgggcgaacccaaggtggccaagcagctgtgggccaccgcagagcgcttcacgccccagacccgcgtcaacgcctacacccaggcgatgatggacatgggcgccaccctctgcacccgcagcaaacccagttgcctgctgtgcccgctggaaaaaggctgcgaagcccacatgctcggcctggagacgcgctacccgatccccaagccgcgcaagaccatcccgcaaaagcgcacgctgatgccgatgctggcgaatgccgagggcgcgatcctgctttaccgtcgcccttccaccgggctgtggggcggcctgtggagtttaccggagctggatgacctgcaagacctggaacacctggcccaccagcacgcgctggaactgggcaaccaacaggaactgccggggttgatccacaccttcagccacttccaactcgccatcgaaccctggttgatccaggtcgaggaaaccgtccatcacgtggccgaggccgactggctctggtataacctcgccaccccgccgcgcctgggccttgctgccccggtgaaaaaactgctgaagcgcgcggccgacgtattgaatgcaggagtgtcgtcatgacccgcaccatcatgtgccgcaagtacaaagaagaattgcccggactggaacgccctccgtatccgggcgccaagggccaggacattttcgaacatgtctccgccaaagcctggggcgattggttgaaacaccagaccctgctgatcaacgaaaaacgcctgaacatgatgaacgccgaagatcgcaaatacctggcaggcgagatggacaagttcttttccggcgaggaatacgccaaggccgacggctacgtgccgcctgctcaataattgatcaaaaaccggggtcagcacgtaagcgacggtaataattaaatatttttcgaaaacttgcttgacgaccccctgaaaaacccgtttaatgcgccccgttgcccagatagctcagtcggtagagcaggggattgaaaatccccgtgtcggcggttcgattccgtctctgggcaccaaataccgaaacccctgattccgaaaggtctcaggggttttctcgtttcagggcttcaaaactgcacgcctacgtcgtaccagtgggtgcgatccccccccaaaaaatcctgtagacgcttttccggcaatcaccgcctgggaatcgattcgtgctgcccgctcaacggcatcagggccgatacagcgggaacgcttctatcagcggcactatttcccggccggtctctatcgcgctttccgagggattgctcgaccttgggatattcctggcaaagtgaaagatgatggtctgcccggtggtgccgtccctgtaatacttgaaataactgatttccgagaattgcccgtctttacgcaatgacgtgggataaaacatcatcgaataatcgattccggttttattgtcggtcagcaggatcgccggcatgttcggattttcttgctggtggagctggatggcgcgcttgccgaggtcgaggggcttgaagcggttcatctcgcgagggacgacggtaaagtccaccatttcattccaggcatcgatgctttcctctgcggggaaatactcccacaaacccggcttctggaatttcaagacgaacgtcttgccgccgaacaccaccgttttggtgtcggcaattgaagggctggacatgtcagaggtcagcggcgtggtgcagccgcagagcagcagaaggaaggcggataacacgagaaatgtggctttcatttcaatccttgaaaatgtgcgtcagtgaattttgcgcaggcaacagtagcccaacgcatcactgaatacttcctttatcgggaaccgcattcacttggagaaggcctggctcgctccgcccatcacacgccccccccagaccaggaagtccgtgctgattcactccagcaaaaacaccatcagcgggttgtcgttcaaccgcccttcgaagcttggcgccaggtgttccacaggcgttccctgcaacagcgcggtttccttgcgcgcgacgatcacccaggccgggcggggcaagttgcccagccgctcaagctcattgctgcggataaatacgggctgctcatcgtgatccaggttcatcatgtagcgcaccgcccaggtgtcccggccgagattgatgaacaccagcggccccggctgcgtggcacgcagcgcctccacttggccgacaaacttgcgggtatcgaactgcatatccttggacggctctaccacagtgaccaacaacacccactgcgccatcaacgcgatcaggctgagccacaccaaccgccctacccgatgccaggcgatcagcgccgccacttgcagcaccaccagcccgccaatcagcagcggcagtgaaacgtccggccagtaaccatgcttctgccagccatgccgacacacaaagatcgcaaccacacacaacgccggtagcgcgacgacaagcccttcgtagcagcggcgcacacccgcaagccagccttgcgcctggagcagcccataggccgcgacagccgcgaacatcggcaccatgggcaggatgtaataagcgcgcttgaagtgcggtatcgacagcccgagcaagatcatcaagccgcaggcacccagccgcgcgaccaattgcatgtcgccctcaaaccgctcgggccagcgatgacgcagggcaatcatcgtggccagcgccaacggcaccaccgggaagtagcggtacagactcagctggaaatagaagtagaacggctcgccggtttcatccaggcgtccgccgacttgcatcttgaatacttcatcggcaaacgcatcgcccccgctgatacgcgccaacttcaccagcagccaccaacacactgccagcagcaccaggccgacaacgccgtgaatcagcacctgtttcacgcgctcgccaggcttgcccagcgcccaatacacacacaccacaccacagacctcgatcaaccccaatggcccgcgtatcgcaaaacccaggacaaacagcgggaacactgcaagccgcctccagcgtccgccgctgtgcagcaggtagaaactacctacacagagcaatgccaccatctgatccaggcagaccgagcgggacttttcgagcagttgggtggtgagcaaggtcagcagcaccgtgagcagcgcccaaggccggcttgcaggcaccaacaagcggtagaccaccgcaactacgccagcagaagccagggcggtcggcaggatattcgccagatggttgggtgcaccgaacagccgggcaaacacatagctgaagaaggtcgcggtgccggggtaatccgcgtagggctgaccataggtggtagggaaaaaactcacgccatggcgaaacatctcttgcaggaacagcgcccaacgcccgtcaaacccttggggctgctgatcccagatgcccaaggtgaacaacaacagagcgaagagaaaaatccctgaggattccaggcgaaaacggttgcggtggtccatcggttgacctgtcaggtaaggggcgccgacttatggtgccgactgccctgctgaatagcgcctgaacagactggaagattcccgcgcctaccgacctgcgggccacacccacttcgggatcaaccttacgtaaatcaactcccccaccagttcgaccagggtttgcaggatcaccgccgtcgccgccaacccgcgcacctcttcgggaagggccagtgccaagggcagcaccaccaatgaattgcgcgttgacgcgctgaatgtcaccgcccgcgccgttgcagcagggagtgcaaacagccgcgacgccagcgcccccatcaacggggccagcaacaggaagccgatatacaccggaatcaccggcaacagcaggttgatatcccgcaccactgaagtgatttgagaaccgatcaccacaaacaacaccagcgccatcgcgggtacgggcaaccatgcccaggcgctgctccacgcgttgaagacagatgaccgccgcgccagggaagtcgtgagcactgccagaatcatcggcagcacaatcaacaacaggaatgcctcgacgaatggccccgccgccaccacgacctcagactgcggccccagcatcaaccccaggtataacggcagcagcgccaactgcagcagcaacagcaccggcgtcgccgccagcatcagccgcgaatcgcccttgccgatatgggtaaacaccaccacgtagtcgatgcagggcgtcagcaacaccagcaacgcgccgaccagcaacgccgggcgccccagcaggctttgggtcaaggcccacaccagcaagggcaccaggatgaagttggccagcagcaaggcggacaggaagcgcttgttacccaagccttggcgcaggtcgagaaacggtatttgcaggaacatcgcgtacatcagcacggcgatggcgggggtgaccagtgcgctgagttcgtgggtgaatgagagtggaagcagaccgaaaacgacggccagcaacacagtgacgaggtagatcggaatctggttgtgttcgagggtatcgcgggtcataaggtggttcttgtcgaatcgaaagagcgcaaggttatgtatataccggctccaggtcgagcgacgtaagcaggcgatccaatccgtcatttgataaaccaccaaatgacagcgcaagtactggcaaactgaccaactgttactaaaaaaacaagaaccgatcagggtcgagaaaccaatgaatttgaacgacgcctctttacaattgcgtccggccccgcccgcacgcgatcacagcgcccccttcaaggaacccgccgccgacggccatatcctgggcggcttcacctggcgccatatcaggaccgaccccgcacgcccggtggtgatcatcaacgccgccacctccgtacgctgccgccactacgctcgcttcgccgactacctgttcgccaacggcctagatgtcatcacctacgactaccgtggcatcggcgaatcccgcaacggctcgctgcgccacttcaaagcctcgtggtcggattggggcatgctggatttcgaggcgatgctcaagcgtgcgcaacgggagttcccaggccagcccattgacgtagtcggccacagcttcggcggctgcgcagctgggcttggggagtcgggcgccgttattcgtcgaatcgtcacagtaggcgcgcagttcgcctactggcgcgattacgcgccaagcggacgctggcgcatgtttgccaagtggcatgtggtaatgccgctgctgacggcactgtgcggatacttccccggcaagcgcctgggctggctggaagatacgccagccggcgtagtgcgcgactggagcacgccgactccccgatatgaaacacgccccagcggccgagcgctgggcgacctgcccttcagccgtgtgaaggcgcagatactggcgatcagcatcacggatgaccccttcggcaccgtggcggccattgagcggttactgggttattttgacggcagcgaacgtacgcatctgcgcatagcgccggaagacatcggcgaaaaccaggtcgggcatttcgcttttttccgcagcgaatatcaggaccggttgtggccgattgcattggcgtggcttcaaaacggtcaattggccgcggatacccttgggatttcccccaacctgcgcttcaatactccaccctgactcagaaccctaggacgccaaccccatggcctcgccgaacaagcagcaaaaacgcgcccaccgggcaaaggccaaggccaagcagaaccgcacccagcgcgccgtcgcagtcaaaccggatgcatttgccggcgatgacagccgcatcgacttggagtcggtggatttaacggagatgttcatcgagatgcgcactgcaggcgaaaccagccagcaggctttgtgcgcggcattcctggcgcacccgctgttggcgctggtgctggagcaggaaggtgaagagcaagccaccgatttcatcctcgcagcgctgatcgagtatcgacagtgggcgacggataccgatgatgaggcggctgcactggcatggatcgagtcaccggcgtttcaggcggattacgtcgcggcgtcccaggcgctgatcaacccagaagcctgacgcgaaaacaaagtgggagggggcaagccccctcccacattgggtcagttaagtaccgctgcacccacccgctgtgccttgcgacgactcgccacaatcagccccgccgccactaccagcaagctcagcacgccggtcgcgatgatctcgacgcggtgcgcttcctggaacagcatgatggtcaacgtccccacgatgaataccatcaccgcgtaggtcaggccagggaacagccacatcttgaagacgatcttctcgcccgccgccgtgcgtttctggcgcatgcgcagttgcgacactgcgatcaccaggtacaccagcagcgcgatggcgccggagctggccagcaggaactcgaacaccgccgccggcgctacgtagttggcgaataccgccaggaacgccgcgcctgtggacaacaacaccgcccagtaaggcgtgccgctcttgttggtacgcttggccacagccggtgcatcgccgcgacggcccagtgagaacagcatgcgcgaagcggtgtagagcgccgagttcaagcaactggttacggcaaccagcaccaccaggtcgacgatcagcttggcgttcgggatacccatgcgctccagcacggtctggtaggaacctacggccgccagggtcggatcgttccaaggcaccagggacaccacgatgaaaatcgacagcaggtagaacaaaccgatccgccagatcaccgagttggtggccttggtgatttgctggcctgggttcttcgattcagcggcggcgatggtgacgatctcggtgcccatgaaggaaaacatggtggtcaagatcgcagccaacacagcgcccatgccgttgggcataaagccttgggtgtcgaacaagtgcgaaacgccgctgacctggctggtcggcaggaaaccgaagatcgccgccaagccgaggatcacgaagcccacgatcgccacgaccttgatcaacgcgaaccagaactcgaactcgccgtagttcttcacgctgaacaggttggtcgccgtcagcagcaaggtgatgatcagggtaaaggcccagatggccacatccgggaaccaggcatgcaggatggtcgcggcggcgttggcttccaaaggaatcaccaagacccagaaccaccagtacaaccagccgatggtaaagccggcccaatggccaatcgcacggtcggcataagtggagaacgaaccggtgtccggcgacgccacggccatttcggccagcatgcgcatcaccaataccaccagcgtgcccgccgcggcatacgccagcagtacggccgggccggcggcagcaatcgcgtggccggagccgacaaacagaccggcaccgatgacgccggcaatcgacagcatggtgacgtgacgcggtttgagcccctgttcgaggtcattggagctttgcgtactactcattgacacacctttgcgaggaattgcgaaaacggtccacccggcccgggatctttctcgtgaaaagaaaccaacagggcgttctttattttttacgcaagatttgcgccaaaatgttacagagccgcgattgacgcgggctgtaggacgattcaacaaccatcgcaagtcattgagaacaatggcattccgctatagcgttaccgtgcgacccacattgaagacgaataaacgcaccataaacacacacaaaaagtacgtgacgccccacaaaagggctgatatgcaccgtttgcccggttaacccttccaacacccggccaaagctggcaccatcgcgcccttttttacgcaaagcctgcggttttccgggttcaaacggttgttcggttgttgatggcgcgacacgctgctgtgccgatgcgacaccccgccgcacaccaccggtttaccgccggccgcgctgttggctgccatcaggacgctatgctagcttggcgcctcgccaggaaggcggcccaacagcaggattgcaacgaacacaatgaggaccccacatggccgaggccacgcccgcgcttgaaatccgcaacttgcataaacgctatggtgagctggaggtactcaaaggtatctcgctgaccgctcgcgacggcgatgtgatctcgatcctgggttcctccggttccggcaagtccaccttcctgcgctgcatcaacctgctggaaaacccacaccagggtcagatcctggtggccggcgaagaactcaagctcaaggccgcgaaaaacggcgaactgatggccgccgacggcaagcagatcaaccgcctgcgcagcgaaatcggttttgtgtttcaaaactttaacctgtggccgcacatgagcatcctcgacaacatcatcgaggccccgcgccgcgtgctcggccaaagcaaggccgaagccatcgaagtcgccgaagccctgctggacaaggtcgggatcgccgacaagcgccacgcctaccccgcgcaattgtccggtggccagcaacaacgggcggccatcgcgcgcaccctggcgatgcagcctaaagtcatcctgttcgacgagcccacttccgcgcttgacccggaaatggttcaggaagtacttaatgtgatccgcgcgctggccgaagaaggtcgcaccatgctgctggtcacccatgaaatgggcttcgcccgccaggtgtccagtgaggtggtgttcctgcaccagggcctggtcgaagagcaaggatcgccacagcaggtgtttgaaaacccgctttcggcgcgctgcaaacaattcatgtccagcaaccgctaacggagcaacatgcatgcagaactataaaaaattccttctggccgcggccgtctcgatggcgttcagcgccacggccatggcagaaaccttgaaaatggggatcgaagccgcctacccgccgttcaacaataaagacgcgagcggcaacgtggtcggcttcgacaaagacatcggcgacgccctgtgcgccaagatgaaagtcgagaaatgcgaagtgtatgtgtccgactgggacggcatcatcccggccctgaacgccaagaagttcgacttcctggtgtcctcgctgtcgatcaccgacgagcgcaagcaagccgtcgacttcaccgacccgtactactccaacaagctgcaattcatcgcgcctaaagccaccgccgacttcaagaccgacgcggcttacctgaaaggcaaggtcatcggtgcacaacgcgcgacactggccggcacctacctggaagacaagctgccggataccgaagccaagctgtacgacacccaggaaaacgcctacctcgacctgacctccggtcgcctggacggcatcctcgccgacaagtacgtgcagtacgaatggctcaagagcaaagacggttcggcctacgagttcaagggcgacccggtggtagaaagcgacaagatcggtatcgccgtacgcaagggcgacccactgcgcgagcgcctgaacaaagccctggcagagatcaaggcagacggcacctacaagaagatcaacgacaagtacttcccgttcagcatcgaatgatctgaacggtatgcccggcgcgctcagttgagcgcgtcggctttttgcaatgcctgccgcgatatgaaaacaccatgaatttcgatctctacggattcggcccggcgcttgccgctggcgcgctgatgaccgtcaaactggcgctcacggccctgtgcctggggctggtgctcggccttgccggggccttggccaagacttcgccgtacaagccgctgcaatgggtgggcggtgcgtattcgaccatcgtgcgtggcattcccgaattgctgtgggtgctgctgatttacttcggcacggtcaacctgatgcgtgccctcggtgagttcttcggcaaccccgacctttccctcagcgcctttgccgccggggtcatcgccctgggcctgtgctttggcgcctacgccacggaagtgttccgtggcgcgatcctcgccattcccaagggccaccgtgaagccggtgtcgccttggggatgtcgaagttgcggattttcacccggctgatcatgccgcagatgtggcgcatcgccctgccgggcctgggcaacctgttcatgatcctgatgaaggacaccgccctcgtatcggtgatcggcctggaagaaatcatgcgccatgcgcagatcggcgtgaccgtcaccaagcagcccttcaccttcttcatggtcgccgccttcatgtacctgggcctcaccgtgctggccatgaccggcatgcacttcctggaaaaacgcgccgcccgcggctttgcaaggagcacccaatgagcggcgactacagctggctggcgcatttcgacctgggcctgaactgggccgtgatcatcaagtggctgcccaagctggcccagggcgccatcttgaccctggagctggtcgccattgcagtgatcgccggcctgttgctggcgatcccgctgggtatcgcccggtcttcacgccgctggtacgtcagcgccctgccctatgcctatattttcttcttccgtggcacgccgctgctggtgcagttgttcctggtctactacggcctggcgcagttcgatgcagtgcgcgagagcttcatgtggccctacctgcgcgatccgttctggtgcgccaccgccaccatgaccttgcacaccgccgcctatatcgccgagatcctgcgcggcgcgatccaggccatcccgcccggcgagatcgaagccgcacgtgcgctgggtatgtccaagccgaagacgctgttctacatcatcctgccgcgtgcctcgcgcatcggcctgccggcgtacagcaacgaagtgatcctgatgctcaaggccagcgccctggccagtaccgtcaccctgctggaactgaccggcatggcacggaccatcattgcccgtacctacttgccggtagagatcttcttcgctgcgggcctgttctacctgttgatggcctacgtgctggtacgcgccttcaaactgctggaacgctggctgcgcgtcgatgcctgccaaggacgttgaggcacgcttccaggcgctggatgcgttcctgatcgagcaccaagggctgtggaaaccacggccctttactcatctgcacttgccttgggaaacccagcaccccgaactcgcccaatggctacgccaacgctcgttggacgatgccgaaaactgtcacaaccacccccatgacctgccggcaccggcgccgtttgcgcagctcgccgcgcaagctcgcgcgctcagtgctgtggataagttaccgacgcagcccctggctcccgctcgccatcgcctgaatgtcgatgttccaggtcgcaagtgggagcaaattgaagccttcggcagtgcgctgctgtttgcgcaagccaccacccactggctggactggtgttcaggcaagggccacctgggccgccggctggtgcaagccgatcaagccctgacctgcctggaatacgaccccgcactgatcgcggcgggccaggccttgagcgatcaccacggcctgcccgccacccatcgcctgcaagacgtgatggccgatgtggcgatccgcgccgaacacacccccgtcgccctgcacgcctgtggcgacctgcatgtgcgcctgctgcaactggccagcgcggtcggctgcaagcagctggcgctggcgccgtgctgctacaaccgcatcaatgccgacacttaccagccattgtccaaacgaggccgtgcttcgaccctgcaactgtccatcgatgacctcggcctgccgttgagcgaaaccgtcaccgccggcaaacgcgtgcgcttgcaacgcgatacgtccatggcacggcgcctgggtttcgaccaactgcaacgcgaactgcgcggcatcgacgaatacctgcccacgccgtccctgcccgccagttggctggacaagcccttcgccgactactgccgggagctggcgcacctcaaagggttatccacaggtgaaccggattgggcggcgctggaggcccacggctggcgccgcctggccgaggtcaggaacctggagttggtgcgtggtctgtttcggcgcccgctggagctgtggctggtgctggatcgggcattgtttctcagcgagcacggctaccaggtcgacgtaggcaccttctgcgatcccacactgacaccgcgcaacttgatggtgcttgccgagcgcgattagagggcaaaattgtcgcagtgcagcctgtggataactctgttgatggattctttacggagcctgtaggcatctgcgctacaggccaaaagccaggctggtcattttttgttcacaaaataaaacgcacgcaaaacaggcagttgcagcgtgatgagaacggctccacaaaatggcggttgggtgacaggtgcatccaaccaattgtgcataagcatctggcgtcaagcgtataaaagcgcgctttaccgttgttttctgcgcgctatcaacagccggcaaatctcattgatatcgtccccggccaaggtcaatgcctggctgtccaaggggtcggtgccaaacgccagcgcctcgctgatcgccaggtcgcggtgcacttccagtggctctttagcgcctaggcgctgcttgaaagcctcgaccatgtccaggctgaaggcattgtcttcatccagttggttgatcacaaaatgcacgtgtggcgcacgctcgcgctcaaggtgcggcgccaatagcacgtcgagttggtccagggtgcccagggacgcggcatctgcctgggcgatcaccaacaccacatcggccacgctcagggcttgatggaaatagacgttattaccggcgggggtgtcgatgatcacggtatgacgggcgctcaggtccaaggcggacaggcgttgcgccagccaatccggctcatgcttgagccagcgttgcaggtcgtcttgctggcgcaggtcggtgtcgccaaaggtgatcacgcgactgccgacaaagccgggctgctggagagcgtcccagtgcgcattgcgcaggctgctcgggccgatacccggcgaacccggactgacgccgaagtgcatgcgcagcgcgttctgcgggtccaggtcgacggcgaccactgattcacccaggcgctgcaggccgctgctcaacgcggtggccagggtactgcgccccactccaccattgaccgacaccaatgccaccacgcacgcacgccgcacagccttatctaccggctgggactgtgcattcgcactgggggtttgcgcgggaaacggcgtgccgtcatccaccgggatgctgccaaaaaaatgcagccgcgcattcaacccctgaacgtcacggctgacatcttttccaagcaacacaagcagaccatcagtaaagctcatagcgaattcctcatcacggcgaagcccaaagacgtgaaaaggtcagctgatacgactgcttaccgcaggtctttttgtggtcgccctagtgcaagcagtctgcttcaggcgcgcaaaagtgtcattattttgatgataaagctgtatgttttttagacaaacggcaaatcgtcaaattaccgaccaagcgtgatcacatcgtagggcgtttgcagatcccgctccggaatctcccaaatcaacaacttgggcggtgtctgcttgaaggccgggctctcgaaataggccttggccgccccggagaactcgcccccgtccttgctgaaattgccgaccggcgcattcagggccttttgcaggaagccgacaaagttggagttgcgcgaaaacgaggtgccgatcagcgccacattgggcaggccggcgtcgccaaacaggtcgtcggcgttgctggttgcgccgccggtttcatgggcggtgctggccgcgaccgactcccctggcggctgcaacctgggcggcaaccaatccagaccggccaggcgcaccaggtctcccgggcgtacggcgaggggcgcctgggtgatgtcgaaggtctgctccggcgttgcctggatgccgcgctgccggatgcgctgcgcgagcgcctgggcgccggcgttggaaccgatttcgctccagtgggtgtctgtgcgcaggtaggcattggcgcccaggggcttcaaggtgtcggtcaggtccagcgcggaaacgccggccgcctgcaactgtttggtccagtcctgaatacggccgtcgagcaccgccgggcggtacaggccacagcgttgggaggcggcgatgcggctcttgtccggcaccaccaccacttgcaggtcgatgcctttttggcccagttgtttttgcaggtcgatcaccgcctgagccttggtctgggcattggcttcggcatgccggttgatgcgcagctcgtcgctgataaacagccagcccgggcaaccctgacgtacccgcggcccggtatcaccgaacgccagccagctgccgccgcgctccaggttggcggcctggatcgccatcggcgccttggccagttccttggcaaaacggtgggtcaggtcgccgtgcagcagcatgtcgctgtcgaccttggccggcacaaagctgatcgggcccttcaccatcaaccaggcgcaggacagcagccccgccgccaagaagggcaccagcacccaggccgccagggggctggtgcggacggccagttcactcggaggcgtcggcgcaataggagcaggcatggtcgggcgtccttagaactgaaagtacagaaacggtacggcgtcgcggctggcgatcagcgcgaacgacaacacaaacccggccaccggccacagcgaagccgccagcacaaaccacggctgggtgccgaagcgcttttcgcaacgcacctgccagatcggcgcgatgatgcacaccaggcccagcaacgccgccatgccatgggccgggcgcatggccacggccatcgcgtcacccaaggccatgccgtgcaggccgaactggccggcgtacatggtcagtgccgaatggaagtccggcgcacggaacaaggtccaggccaggcacacaaacagcaaggtcaggatgtgcgacaacaccggcgggatgctcggcaggctcgaccgcgaccaggcccggtcgacacacaacgccacgccatgagcggaaccccacagcaggtagttccagctgtcaccgccgtgccacaacccggcaatcgccatggtcaggaacaggttgcgataggtgcgccacacgccgtcgcggttcccacccagggcgatgtacaggtagtcgcgcaaccaactggacaaggacaaatgccagcgccgccagaaatcctggatgctgctggccaggtacggccggttgaagttctccgggaagtggaagcccagcatcaagcccaggccgatggccatggcgctgtagccggcgaagtcgaagaacagttgcagcgaatacgccaggcaaccgatccaggcgtccaccaggctggggttttccaggtggaaggcgatgtccaccagcggcgacaaggtgtcggccaccagcactttcatgcccatgccgatcataaagcgccgcgcgcccagggagaaattcgcccagttgaaataccgctggttcagctcgcggcgaacccagtcgtaacggatgatcgggccggcaatcgagtggccgaacatcgagatataggtggcgtagttgatgaagctgcgctccaccggcaccgtatgccggtgcacatccaccaggtaggaaatcgcctgcaacacgatgaacgacaagccggccggcaaggccacgcgctgccagtccagcggcatcgcgccgtaccaggtgatcacctcgctcaccgtgccggcgacgatgttggcgtacttgtaccaacacagcaccgccgtgttgaacacgatcaatgcgattaacaggcgcacccggcctttgccgtcctcacgggagcggtccaccagcaagccgccgacccatgccactacggtcaacaccatgtgcaggaacaggaacagcgggctcaaccagccgtagaacaaccagctgccgatcaacaggatgacgttgcgccagctcggacgagccagcgcgtagatcaacaggaaggccggcaggaacagcgtgaggaattcgagtgaggcaaagaccatggtggtgtcgggcccgatcagttagcgagcgtgtcaggcgcgaacaacaaccgggtaccgccagccgctggcattgccagcacgctgtagcgctcgccggccttgagggcgaaggtcaacggttggccggttcgcgcaccggcgcacttgagctgcaccgacagttccaccgggttgatcatgcgacgttgcaccgaaccttcggcggcgttcttgaacagctcggccttttgcgccacggcttccaggctggcatcggcacacgcggcgtcggcattgacgaaggccagcgaggctttcagcgcgttgaagtcgtccggctgctcgtgaatcaccagttggcgaataccgcccttggcatcagccaccgcgatcaccgtagcgaactcgcctggggcgacagtgacagccaaatcagcgtttttgccgccctggctcaacacccctttgatcggcgcgctgccgcccgacacgggcaggtagtcggagacaagtttgtcgccacccagcaccaggctggccttggacccttcggccaccagcttcaactcgctgctggtgccgttggcaaagcgcaggaacgccgagtctttttccggcccggtggggtacaacgggatgtcggcgctatatgcgctgacgctggcgagcaaggtcgccaggcccagggaaatgcgcttcatcacttggctcccttcacagcatccgccggcaatgccgacagcgcgccgccgatggccttggcccacttctggtagccgtcgatggtgaagtgctggccgtcggtggtgatccattcgcctggcttggagaaggtcagcgagtcgatgtaggtgcacggcgccacgttggtcgccaggaacgacgacatcagcttggtgcgcgcatcatccttcttgtacaggctgccgaccttgccccaggccgggccgacccacacgcacttggtgccggtttcgctgatggccttggtcagcgacgtcacgcttttccaggcccagactttcggaaactgcgggtccgggtaggaggccatggtgtcgccaatgatgatcaccacgaggtcgggtttgtctttggcgatcaggtccttgaccggcgtggtgctcatggcgttcttgccgaacacctgcggcttggcgcccggcaggttttcggcgccgcagtcgactttcttcggcacgatccaatcggccgcgccggcaccgcaggcgccgatggtgtggaccttggcgccttgcgccgtcaggttggcttgcagcggatcgagcaaatggtccgggaagctcaggtggctttcgccgagtaccagcagggtcaggccggcaattgcggaaacaggcatggatgactcctatcaatcaattcgaatacggggaacggtaagggctgaccggcagcggcataggcccgctcaggtcttcaaacaggtagcgcaggtacgcgttgccgacgtactggcgataatcctgggcgttgtcgacaccgacttcgccacccaggtaaaagcgtgaagaaagacggtattcagcagccgcgttgaggctgtagccgatgccggtcttgctgctgctcttgtatttcgggttttcaaacgattcctgcaggtccttttccgtcgggaaataatcggcgccatcttgcgcgatatgctgcacgcccaccgaacttttcacctcatagctgaaacggtcgaagctctgtgcccaacgcaccggcacggccagggagaagaagcgttgcgggctgaagtatccgccctgaccataggtgtagaaaccctggttgtccttgaagcccattgccatgccgctgacgcccagggtgagggtgtcggtcggcgtgttgcgcaggtaccagtagacgccgctgcccaattccatgcgcgtgttggcttcgacgttatgtcccaacaacctgtgcaaagacgcatagccgtaggcaccgacctcctggtcgtcgtagctcaattcggcacgcccgccgttggcggtgacgccgccccacttgtccgtgtggacttcgccatcggtgtcagtgatcctggcttttgaaccggcgaacgaggtgacgctgtcggtcacaggacgccgtgaaacgttgacgccatagcgcaggttgccgccttcggtgaacggtcgattcacactcgcgccaccgaccacggtgttgtaggtaaagcccagggggctcacgccgatgtccgccttgacgccttgcgccgtgtcttcaacggcaacggccaggccgacaccgttttctcgcttggctttgtcctcgcctgtgccggcaccaaaacgcgcagccgaaatggctttgaccgtccccgaactcaaactcaccggcgtcacacgcaacgccacgttcatgtcgcccaccggcatgcgcgcttcgaacggcgtgtccacttgggtaattttgctcaagccactttcaccgttgttgctgcgcacgctcaggccctggaccaggtaaccgctacggtcacgcagcatcgaatcgagggcccgttgcgcagggctcaaggtcgggttgtccagcgcggcaatccgcgttggcggcacaaacggatcactcaagttgttcgacggcgcatagccgttgcttgccatggcatttgtcggaacagtggccgcgaccggcgctggcatcacgttggccggcgcatcgatgggcggcggcacggtgccgcgatccaccgccaggtcggtaatttgccgacgctggccaggcaagccgacgaaggggttgtaggccacgccctgggcgtctgccagggccgaccgcgcctgggcacgctgggtgttttcgatggccagcgcgcgacgcagcaattcagtggcttcgttattgcgacccaggccacggtagatacccgcagccgacgtcagcacttcggcactcgtaggttccagggtcaatgccttgtcggcagccgattgcgccaggccacggtcgccccccttcaaggcgatgtccgccagacccagttgcaactgagcgttacccgggttttgctggaccagcggccggtagaggtccatggcttttttgccatcgccgcccgcagcgtacatgcgcgccagtgcaccaatggccgacgtgtcgttaggtcgctgggccagggctggcgagagcatgtcgtacgccgccaccaggtcgttcttctcacgcaatgcgtcggcttgcttgacccggtattgaaagatcaggtcttcgtagcgctggcgtccggcgtcgctcaggggttggccctgcaactcacgcaggatatcgccggcttcggtgtagtgattggccttgagcaatacgctggcgtagagcagcttttggtcggcggtcgggttcggagtcttttccagcacgccttgcatgatctgcaggccttcttccggtgcgcccacatcgacataggcagacgccagcaccgccaggcgttccggttttttaccggccagcgcggcactgcgaccgagcaaggccaaggcctcgggacgctgaccacggcgcgcggtttcgacagcgatgtccgtctgtttgtgcagggcgatatcgctcgccaactcattcatatccgccgtgcgctggccgaccggaatgcgtgacaaggtggcgtcggccgccttccactcgcccagctcaaccgacagcaaggtgctggtgtacagcgcatccggctggttcggctggcttttgagcaggccatcgatcaaggcgcgggcgttgcggatctggccatcccgcaggtagacccgcgcaagggcgaaacgtgtccaggggttttccggatcggcatcaagcgcttgctgatacgccgcctgggcggctttcaagtcgccgcgctgatcggccaacttgcccaactgggtggcgcgcatggctttgatcttggccgtcgaggagaacttggcacggtcggccggcgacaccgaatcgatcagcttcaacgcttcgtccgggcgacccgattgggacagcacgccgatcaggccattcaaggcatccgggtcgccagggttgcgcgccagcactttgcggtacgtggcttcagcggcgtcgaactgattgtcctgggcctggaagccggccagggccacggcggcgtcggcgcgactcgggttcaagcgctcggcttgggccgccaggtcaagggcttggctgctacggccggcagtttgcgcgtcgcgtgcctggttgagcaggctccagtagcgcacttcgttcagggccttttgccaggcagcgccgccaggcaggcgtgtggcttgcccgaggtaatgctccgcctcgctgaagcgctgttgctgctggcgcaccacgcccatgccaccgagggcatcgacatcgttgggcttttccgcgaggcgcgccgccaacagcggctcggcggttttcaggtcaccgtcgtccagcgccttgaacgctttgaccaacttgggatcacgctgccagccgccatcgcccttgctctgggcaatgcctttgttcatcagcgcacggatctcagtgtcatccggatgcttggccaggaactgctggaacaacggcacctggtcacggttcggtgcaccgagccacaacagtgcaaaacgccagccctcatcggcggcgccgcccacgtcgttgtcggtcgacaggcgctccatcgcacgaataccttcgacgcgggtggacgggttacgcgccaagtgccgggccaggaacagcgcggcgatcgaatcattcgggcgctcacgcgtgacacgttgcaggccggcgatcccttcggccgtgcccttgggagtgaacgccaaggcgttgtaatactcacgcgcaatcaggccctgaggctggcgcccctggaaaatctggcggtacagcgccacggccttttcgcgatcttcaaccggctcacccagctcacgggcttgctccagcaacttggcgttggtgggggtgttgacggcaatgtcttgttcaagctgcaaggcctggcgcggcaggggcgaaattgcacgcaggcgggccaggtatttctgcgcctcttccgggtgctgctgttgcacctggatcaggccgatgccatacagcgcgtccggctgctcggggctcaggctgagcagtttctgccagctttccagggcgcgctcggggtttttcttcgactgccaatagttaccctgctcgatcagcaaggcttgtgggtcgctggttgcagccaggctggcgctggacgccagggtggccaatatcgcaagggctagcgtgtggcggcgcatgcgccctcccagaataatgtgaccgtaccgtcttgctcgaaacggtacttttgatcggcaaaacctttgccgaacaggctaagcatgtagtcgtaataaaccggctgcgcggtatcgggcgcgtcgggggccatggccttgcccaacacgtcgtcgagcttgtgcttttgcagttgcgccagggcggtctcgccccgtgcctggaagaacaccatggccgacgccgagaaccccagcggcgagtagccattgttcttctcgacttcgccggtgagcacatggaccttctccggcggtaggccattgaccgacgcagccgtcgcccgtgacaacccacccaacgccttgagcatcggcgccgcgagggggtcgctcttcgccgtcatcccggcccacaggtaggtgcggatagcgtcgtaactgcccagatcgtcagagtacgggtcaaccacaaacacgccggtattggcgctggtggcgcggtagcccacccagttggcggcaaagccatgagggttgctttgggggtcggccagcatcttcgcattgctgtcggccacatcattccagccgccgttcgggcgttctttgtggaagcggcgcaattgcgccaacacttgatagctgggattgaagcgccacaaaccacccggatacgaataacccacaggccccggcaacagcatcttgcccaggcccggtacacgtacgatcagggtcttttccacattggccaacacccattgcgcgtcggcacggtactgcggcacattccagatgcgcgcagcttcgagcaacgcataggcgatccacagatcggcatcgctggcggagttggcatcgatcacgccccactggccatctttgttcttgccccacagccaggcgaacaggttgtggctgaggtcattgccggccatgttggacttggtccacgtccacagcttgtcgaagcgcgcgcgatcgttgccgaccagggcaaagaacatggcgtaggactggccttcggaattgctctcgctggggttcagggacgagttcaacacccgcccgtcatcctgcacaaagcgcgtggcatagttctgccacagcggccattgcgcatcacacgtctgggcctgggctgcccccgcaaacatcgcggcgcccacccaggcccaagcggctggacgcatcatgccaaccgccgttttgcacgggcacgcaaggacaggtagatcaggcaggtgacaatcgccaggcccaggaaggtgaacaacaacatccaacccaggttttgcgacagttgccattgcaccgacttgaaccagcccagtttgcccacgtagtactgctggtcagccaccagtgagctgacctgcgtgccctgcaccaccgccaggctgccctggatggtttctttatattgatcgccgccaatcagcacagcggtcgcggcttgcaggccttctggcctggaactggagatcagcaccacactgcgcccgaccttgagcggcgactcgaaaccggcaaaccacgtgctggtgctcaagctgttgaagctgatggcggcgttggccgcgtgcttgttggcttcggcgtccgggctgacccagttgctgacgtagcgcggcaggtccgacagtttgaagtgctgctgcgggccatcgaccgtggccggcaggtactgctgccattgcttgaacaagggctggtcggcaccggtggcgatcaccagcaggtctttgtcagccacactttgcacgtccttggcttgcaccactttgacggcggtcgccgggtaaccggtggactcgccgaagcggcccaggatggtcaagtaggcactcaactcgtcggtgccaaaggtgtcaggcaacaccacggccgactcggacaggtcggccaggcgggtgaacgggaaaccggcatcgttgaacacgcccaggttcggcatagcgatgaagtgttggtagccgctgatgtccaggctcgaatccgggtcgatggtaccgcgcatgttatcgacgatgatgtcgcggcattcgccttccttgatgtagtcgtacataaagcgcagttgcagcttggacatcggcgacgccgagctgatcggcagcaacacggtggcttcgcgcggcagcgtgttgtctttctgcatcatgctcaacagggtcttgccgtctgccaggctggtgatcgacggcagcggcatggacttcatgaactggtcatccagccccaccagcaacgacgaattggtcgacacttgctgcggcgtgtagcggtacttgaggtgcagcggcacgccttcttcacgccagttgaacaggtcgggcggcaggcggaagtcgacactgatcgggccagggttgtagcccgcgacgctgagctttttcagctcgaccagttcgcccagacgtaccgggcgatcactgggcacccagttcggcgcgtcataggggcggcgcggagccaggctttcaagtttgtcgatgaccacgctgttgccggcaagcaccgggttgcccagcgccaccgccgtggcggcgcgcttgagttcggcgccgtcgcgccccgacacgatcagcaacttgccctgggggtcgttggggttggcgatcaggctcagggtcggcccgctggcttgcgccactttcacgccattgacgtcgaccgcattcgggctgagcaccagcacaatggcgttgcccttggccgggatcgtgccgtaggccgtggggaaagtagcgccacggtagctggccattgcgccgaaccatgacgacagcgtcgccgctgcttccagcgtagcgttatccggtggagttgcgaacacgaacggcaggttgacctggcgcgcatcacgcttatcgaagaacggcagcggcagcaccgacagatcgtctttcaacaggatcggcgagacctgcactttcagctcgctggtgttgctgatttttgcccagaggctgctgtgcagcgggtcctcgcaagacatggtgtagtgaccgatgaactgcaaccgcaggcggttgaactcggtgatcaggtgcggcgcaatctgcacgacggcctgttgcggggtgccggcgccttcttttggcaacggcaggctggcggcgacttcgtcgttgaccagcacgttgatctgcgacagctccgccagcagcgccggcgaatagctgtagttgagcaacagttgggcgcccgtcacaacctggtcagcacggatgtcgaagttgacgctgtcagatgactccacaccctgcaggttcatgctgtcgcgacgccccagttgcttgagcgtcaggctgtagccgttctcggcaccttgcacggcagcaggagcaatcactgccttgtcggccgcttgcagcagtgggctcaggcccagcagcgaagcgatcagcaacgcatgtgcggcgcgcgaatgagcgcgcgcgaaaaaagctgtggaggtcatggcttgtccatcaacgtatcaagcggttgtgagggcgtgcggcgcagggccatacgtaattcatgcagggtggcgcggcacagcgtgaacagaccgccgatgccgataccaccgacttcacgcaaggctgccagcggtgtgtccggctggccggcgccccaactggcggcccaggtgtcggcgcgtgagaacgtcaggcgcaccagttcgctttgctcgcgcaggcttaatgactcgaactgcgcaccaatctgtgtacctttgctgaacgccacccgcgcctggaacaggttgtcctgaccgttgcgcgacagcaccagcttcacccgttcaccttgggtgatggagtgaccatcatcgaggatcaggccgaagccattctgcgagaagtcctgggtgatcccgtgaagcacacgaccgtcggaacaaataatactcaccggcagcttcgcactcacacgcggctcggaacgcacttggcgcgtctcggaggccaccgccacggcggcgctggtgatgatcaggttgtagagggtccaggtcaggttgatcgccacggtgacagcggtggactcatcgccatacaccaactgatgcacgccgaaaccaataccgatcaggttgaccagcaacagcaccaggtacgggcgcgccagtttccagtcgaagaactgcttgtcgatgatgccgcccttgtcggtgacgttgaagccaccggccttggggttgaccagcgcgaccagcaccggcggcaggatgtaccaggccagtacggtctcgtagacctcgttccagaacgagtgacggaagcgcccctggatccgtgagttggtcaggctggagtgcaccaggtgcggcagcacgtaggcgacgatcatcagcgccgaggcgtggaaaatctcggcgccgaacaccaggtaggccagcggcgcagtgaggaacaccaggcgcggcaacccataaaagaagtgcagcatggcgttggcgtagcagatgcgctggccccacttcaggcctttgccgagcaacgggttgtcggtgcggaaaatctgcgccatgccccgcgcccagcgaatccgctggttgatgtggcgcgacaggctttcggtggccaggcccgcggcttgcgggatggccaggtaggcggtgttgtagccgaggcgattgagcttgagcgcggtgtgggcgtcttcggtcaccgtctcgatggccacgccgccgatttccagcagcggctcacggcggatgacggcgcaggagccgcagaaaaacgtggcgttccacaggtcgttgccgtcctgcaccaggccgtagaacagctcaccctcgttgggcacggcgcggaaggtgtcgaggttcttttcgaacgggtccggcgaaaagaagaagtgtggcgtttgcagcatcgccagcttcgggtccttgaggaaccagcccaggctcacttgcaggaaggaacgcgtcggcacgtggtcggcgtcgaacagcgcgatgtattcgccgtcggtgactttcaacgcttcgttgaggttgccggccttggcgtggaagttgttgtcgcgacgaatgtagttcaccccgaccttgcggcagaagtcgcggaagtcgtcgcggcggccgtcatcgagtacgtggacgcgcagcttgtccttgggccagtccatcgcctgggcggcaaagatggtcagttttacgatgctcagcgcttcgttataggtggggatgaacacgtcgaccgtcggccattcctccggctcggtcttgagccacaccggcgtgcggcgcagcggccaggcggtttgcacgtagccgaagatgagtacgaccatggcgtagaactcggccgcgaccaggccgtagccgaagaacatgtcgacccaggtttcaaagccgagggtggaggtgaggcgccagaacatgtagcgcaacgacgccaccagcgacagcaccaccagcgcaaggatcgccaggcgccccgggatcttgcgcaacaccagcacggcgaggaagcacacacccgcgaacaggcactggctgtagaggtcgagcggcgcgctgataatgcccatcaacagcagggcgccgagcacgcaactggcgacaaccagtaccgtacgcagcgccgcaggccaccggttgaagcgcgcgatggcgccattgaggcgctgttcggcgcgcccttcgacgaagggcgtggaggacgtagtgtcggtcatggaaggtccgagtcgatgcgttcgagcaaggtgcggcacagggcgtggacgtcctggctgccgatactgttgacggttgggtcgaggggatcacgcccgtaggcctgggcttcgctgaacgtggggtcgcggtggaccgtccccaacagcgcagcacccaggcgggtcttgaacacctcggccatgtccaggctgaagcggtgggcaccgtccagctggttgatcacgtagaagcgttgtggcggtttggcgcgctggaggtatggcgccagcaggctgtccatctggtcgaggatgctgaacgaggccacgtccggctgtaccaccaccagcaccgcgtcggccaccgacatggcctggctgaggtaaacggtgttgccggcggggacgtcgatgatcacggtgtcctggccgttcaacttgagaccggacaggcgcttgccgagccactcgctgtcctggcccaaccagcgattgaggctgtgctgttgctcgtggtcagtggcgccgaatgccaccagccggcaaccggcaaaaccgcgctcgggcagggcttcccagccttcgttgcgcaagctggtagcgccgacgccgggtatgtcgaggcccaggcacaggtggtggcgcagggcgttttgcgggtccagatccagggccagcgccgggcggcccatgcgctgcaagccactggcaagcgcagccgtgagggtgctgcgaccgacgccgcccttgaccgagaccaacaccacgactttagggctcgattgctcggagtacacctggccgtcccgcccttccaccacttcgggcggctgcaggtggtcggcttcgccttggctcagttcctccagcaagcgcagcagaggcgccgagggggcttcgatctcaagcggggctggagtgactgcgggagcttccaggacctcgacttcgtcctcgatgaactcatggacaaagtcgatctcacgatagccactcgggttggcaccgagcttgttgaatagctttgaaatgtcatctgcccgactcactcactgcccctccccacctgatttgcgctttataaaggcgataaaaaggccagcaaggagctgacctggttttttctagttatgtggtgtcgggcgcattctgtgatatcacaatgatggtgtcagtattttgatgttttaagttcaatttaatccgacgaacggcctggcgccatttttacgacgatttcatgaagaaaaacccattcgttttaagaacatgtacttgcatcgttatttcacaaaaaatcttggccgactggacaaaaacgacacaaaactgacatatgcatcaacagatattcagttgccctacattgtctcgaaaatttgcctacacgaaaccgcgattaaactgacggtttatatcgcggcacagaatacggaaaccgcacctgtattcaagggaaaaccggctgagcggtcgatccaaatgacccacacggctacggccgatgtatcgctttgtatgcagccaaggtctcgctacacaacgaagcaaaacccgcgccgcatgacacagtgcagatacctccagggcgctcaataagcccacacccacttgttgaacccggaggatacccaccatgaactggaacaccttgatcgccgtcagcctgctggcttttgccgtcaacgcccacgccgacgtacagcccaagctggatatccagcgcgtgctgaccactgtcgaagacacaaacggagcgtgtgggatcgtgaatgcgcacatgacctacctggattcccacgggcagcaacaggtattggactacaagaagtttgcagataactgcgcagaaggcagttgaggcttgcgcgaaccgggcacctgagtgcccggtttcggagcgtttctgaaggcttagcgcacacgacgctcggtgaacgcgtagtcatcctggcaatcgctggtcggatccgacgccacactcacgtaatgcaccgtgtctgcgtccagcagcttataggtgtacacatccggcgaacgcacgccgtcggtacgcaactcattcctgccattggccgccgaccacgaaccctgctcggtctggatcaccttggtctgctgcgcatcgcggtagaaggtaatcacaaaacgaccgtcaggtttgagggtattggtccacgacaggaactgacatttaccggtctcggtgcgcagacctttccaggtgcccaccagcgccgggtcgttggcgggtttgttggacgaacacgcagcgagcgcgacagtgaggaggatgagggacagcgagagagtccgtttcacgtggggcttccttgggtttggagaagatttttgccggggtagacccttcggcggcaagggagaaatcctacactcgccagctgtaaaaaggggcgagcgtggaaaaagcgcgggttctgcaaaaatagtcagaattcaggggtttacagaaccttgccaatcgctataatcgtcgccctaacacgccggtatagctcagttggtagagcaactgacttgtaatcagtaggtcccgggttcgactcctggtgccggcaccatacaaaacgaagcccctgcagaaatgcaggggctttgttgtttctgaaacgtcccccctgaaacccttgggagcgagcctgctcgcgatgaggccatcaaacccagcgacgatctactcaccaaagaaaggcctgcgtttcccaagacaccaaaaacgcagcaacctcaaccaaacagcatcctttgccaatgatcctcacccacaatggcaatcgaagctcctgcctcccgcaactccactgccttcatgatcttcgtcccataggtactatggcgccactgctcattacccacgcttccgaccaccaggtagtgcaccttcttgctcacaccgcccccaatcaaaccacctcgttcttcgaccagcgcctgacaatccttgcgcggcccaaagctcatgacacccgtaaatacaaacatccggccatcccacaccaaatcaggggctggtgaattgaagggcaggtccgtaggagtaacggcaactgtgccgccgaccttcgctctctcaatgtccactccagaaaaaccacgcagaatgttaagcaactcctgggactcatccacgtctagcgcatcgtcctgaagcatgtacgccaaacgcgaatacagcagattgatcaccggatcgttcagatgcgcgagattgttttccagccattgctttagaaaaaccgcttccgatatgttcacgacaccatccgccgtaattccagcggccaaccccaccaatgcgtcggcggcgcgacgatcgatacgggcccggttgaagaatttactgttttcgaactcgttgtgtagatccattacgggttttccttggggtgggaactggcttgatatcgacgcgttagtaagtcaatgttgtattcaacgctagtaccactgcgcgcatatatcccattttgaatctggataatagatccgtcccctttcccattcctgttggggttaactgggcattggggtggatagttttatatgctgacgtggtatcggggtgctcagtcaagaaaatcattaaacgattatgggctcctcaataatatagcgaatgggctatatcagtcaggctggctaactaactctccgacttcgggataaattttccgatgtatacatagggttctagatcaaacgcttgcttcagcccgagagcatcgtattcagttatgctcggagtttcggacagtgcagaggtaaccatagtaagacgccatgctggattggataacagaccctttccatactcattccgagtaataaagaattgaggagtgggactggatgtacctttgacctcgacgtgccgcactgatttacctttggtaaaaacaaagtcatacccacagggtagatgcgtaacgcgttcgcaggcatatccttttgctttgtaatactcaatgacggcgcattctgctgccagttccacgtttttccgatgctccggtgtaccgaatccttttagaggatcggctgcgtcgagttcgggatcgggtaacgagccctcgttagggttctggatagcgaatcggctcatcgctttcagacgactgttgagaagtttcagtacgcgcgttttgttcttattggtgtctatgcctggtccttctaggaaggaatatttgccctgcctcacggacggatctgagaagggcatagttcggtactcaggcggaacgaagtatgcggtcttgctagagatgcagtatgaccagtcataggccgggtgcgcagcatcccctcgctttttgatcagactctctggaggatcaagccattcaccatgaagggtggcattttcgtaccaaccgacaacatggacgccagtgtgctttggatttttcgcgaggcaaatcactgtccagccatttggatcatcgtttgacggtgcatactcgcttgcttggggcggaacataacaatagtaggttccatcagccccagggttaaagttgagtgcctcgtgcccccgtccttcgttttttttgcccttgtttttgttgagccaaccaaaattaccgtcgaccgggccgccgcgataataatcagaccagccaaacttcacccataaaatttttttcacagacattgccctgccctagttgatttcgtatgtcgggttagatcaacaagctgagtaatgccacgcgcatattatttcgtgcgcagcactacgctgtgcaaatcagctgaaaagctcaactatgagacgttaacggtgattacgcgaaccgaaattcgtttatcaggaaatccgggtttcgcggcagggtaatcggtattaacaacttcggacgataccagcttcaaattggcaccttcggcgaacagaacctcattttcatggcctaagtttgtaccgttgcgcttataagcaaagacattcgtttttgggctagttactgttagcacgaacaaatcaatgcggcctgcgtcgtatgctttacttcggtggtctgcatttcgcagggcgacctggggacaaaatgatgtagataaaggacgatccgtgactaacgtggtacagtcaggccacagccctgcatgaaaaaggcattgaccttcactcagcacctgtgcgatttcatttatctctgccgataccttggcaaagtcacaattcggatatgacttctgataccgcgccagcgcatcaggagttttggatggcatagcttgtcgccactgcttgtgggcgggactgtcatccagcgctgcgttgatgaagtccccgaggccgttgtcggctccgacgcggcccatatagatagccgcgtcgtaagcgttcgcaactgttacctctagtctgacctttacgcgcatatggaaactgctggctgccagcatctcctcaacggtgggatgccttgtttcccatttttcgtaggggggcgaaaacgtgtttacaagaggaaggctcattcacaaaatccttttttcagtggtcattctgctgcaactccatccaggtccctataggtaatgtcgggttggcgctgatgagatgtacagaatgccatcattcgtcctcggtatcacctacgaaaacacgaagcatgcatggtgtgcaatttcggtgctttttgggagtggaggatctgaaagcgtaagggatcgtgcgagcaccaaaggatatttttagggatagcggcctataaaaaataataaaaacattaaaaatcatactgttatatatcttcgactcctggtgccgcaccatataagacgaagccctcacagaaatgtgagggctttgctgtttctggggtgttcatagctgaatcacaccccgcccctcgcttcaaccaatcgctaccctcttaaaaaacaacacttcagcctcaaagcttcatctttcagcctttattccaaattatgaactgccaataattatgacccagccataaaaacaataatttcagtagcaacctacacaccctaatgaagccctgaaaatcatcccatcaataatcccgattgctccccacgtcccaccacgctaccctccgttccatcgctgccaattcagcgatcgggcctgagaacccggcaagatgcaggcgcaccaagcgccccaaaacccgatttgcaggcgttttttttcgcccaccatttcgtgcaatggcggctgtgcgtgggagaccttcgggtctgccgggttcctgtatctccggtttctcagcctgcgcacagctgccacccattcgcctgagaacgaacgtggtagctctcaccagatatgggagttttaccaatgaccgctacaagtccgtctgcgttaaccaccctcggcgtcacccccttctcctttcactccgaccaacctctgttccgcgtcaatagcggtgtttccctgcatgaagccttgcaccacgtttccgacctgctccatgtcgccaagctgctcgcagaagatgcggcgatgacgcgggagacggaccgttatgcctgggcttcgcattatttgcaggagatgagcaaggcggtgattgatgatgtggtgaaggtgttggagtcacccggcaatagcgcgcggtagacctcactgaaaaggcctgtcctcgccatggtgcagttcaacttgtggcgaggttcgttatcgcgccctataaagccccatccggcccccaacaaaaaaggcacttgccgcaaacgccaagtgcctttctcacaccacctaaaacccaatcaccgcgccaacataaacgtctcatactccaaatcttccagcgccgacgacaaccgcgccagccccagcagtacacacaccagcaatgacaacgtaaacccgtagccgaagaagctaggccccaggtgcatgctgagcagtgtcagggctgcgttgagtagggcaaacagtacgcacagttccaggaccacgcggcgtttgtcgaggtagaagaacacgttgagcaacgccatgaagaccacctggatgctcacaccgatcaagtcgatgtagaacagtggcaggtagtagctggagatgccgatccattccagcaggcgcggggcgaagaggaacagcagcaccacggtcaggccttggactttgcagatttccagcaggccctggcggatggagagggtcatctcggttttcagcgagccaatgtgctgcaaggtctcgccatcgcggatggcacggaacaagcggtcgtaccactcggcaaagtcggtctcgatacgcaccaggaacacggccatgccggggatgatcgccaagtaggcgatgaagatcggcatgtcgtacaggatcgaggcgcgcagcgggcctatcaccgtgttggacgtgcctgggttgaaccagaacaggattttgtcgacccagatgccgaagttgtagaagaacccggtgactagcaggctgaggaacacgttgcgacgattgagaaaatcaaacgcaatcattttctcggcacggtactcgcgcaggatgtcgtacaggtacaggaacaacaggctgccgtgaccgatcaacagcgccagcaacaggccgggcatcttcaggaagctcagcaggtaggcgcacgcgaccatcagcgagtaacccaccaccatcaccagcaggatgcggttgtactttttcatccccgaaagaaagatgatcaccagccacaggttgcacagcaccacgaagttcgacagcaccagcacgcggtagatcagcggttgatcgaacaggagcgccagcacgattacccccaacaccccggcaccgaccgtcaccatcaacaatatgcccagcaggttgggcaggatctgatcgtagttgcgctcgaacaactggtcggacacgaagcgggtgaagaacaactgcaggccgcccgtcaggatcaatgagctggccatcaggtacgtcaccgtgaccagaaactgccccaccaatgcgttgggcaacagcaggcccaggctgatgatccccaccagcatcacgctgatgatcgacagcacccacgggccggagctgatcaggcccgcatacacataggcgtgcaaggtggcggtgtatgagtcacgcgagaggatcttgcgcagttcgaagccaataccggccatttaactgttctccatggcggcctggtacaggtcgcggtagcgctgcagcatcaaggcttcggtgtagtaacggttgacccgcagcaagccggcggcctgtgcagctttccaacgctcggggctgcgcagcagttcgaggatcgcggcagacgtcgcctgtgggtcggcaatcgccaccaccttgcccgccacgccgaggtcgcggtcttcggcgctgccgccttcgatcagttcgcggcaagagccgacgtcgctgctgacgaccggcgtaccggcggcccaggcttcgaggatcaccaagggttgtgcttcgctgatcgaggtcagcaccatcaggcccagcttgggcaagatgtcctggatgcgctggaaacccaggaagtgcactttgccttcgagccccaggctcgccatcaggctgcggcattcgctcacgtattccgggtcttcttcctcggggccgacaatccagccttcggcgtgcggcatggcactgatcacgccgcgcatggcacgcaggaacgttttcacgtccttgatcggcaccacgcggccgatcaacccgacaacgggcgcaatgcccggctcccgggtttccatggcacgggaccattgcgacaggtcgatgccattggcgatcaacgccgtgcggctcggatcggcaccgtccttgatctggcgctgacggttgccgtcatacaaggcaatgatcttgtcggcgctgttgtaggccagttggccgatccgttcgaaatagcgcacccacagggtccggatataccccgagcccccgtcgaggctgcggttgagcgcctgcccggaggtttcggcaatccaggtggcctgggccagatcgatcttgcgctccttggtatagataccgtgttcgctcagcaggtaagtgcatttccagcggtgcttgaggatgcaccccagcagcccggcgtaaccggtggaaatcgagtgcagcacccgcgccggcggcatcttgcgcgaggcctcggcgagcatcagcaacggcgactgcagcgaacgcagcgtccagaaatagttgacgaaagacgggtcggcgcaatgctggcggtagccttcgctgagggtttcccaactggcacggctgcgcagtacatcatccagggtcatatggccctcggcgatgcagttgagcaggcgctctcccagttcccgctcgggcgggtccgggtggtgcaaaaagcgatacaggtcggccaactgctgcgggttggcatcgcggggtgtgccacgggtatcggcggggtgcgtcgcgtcttcgaggaacacctcctcgatgtgcaccacattcaccggcacttcataacgccgcgaggtatacgccgaacgctgaccgccgatgaacatcaccgaaaaagtcagctccggcaggccgaggatcatctggtggatccagctcgatacaccgccgcgcacgtacggccaggtgccttccagcagcaggcaaatgtcagccgtcggggtggtttccttatgattcattccagctcctcaccaactcagcaaagggtggccgctgacgggtttcttccggcaggctggcgagcagcccggggatttcgtgatagcgacccgcttcgaacgccaactcggcatggaaaggcagtaactgagccggccccagaccgtttcgctcagcctcgtgcaagagggcctcagcccgctcgttttcaccgcgctccagggcaatacggccggccagcagcaacagctcaccgccctcaccggccgccagaccttgctcggcatgttcgctggcctggttcagcacgtgctcaagcacgctgccttgggccaggccgaggtaggccaattcccaataccagcgcgccagcatgctgtgcaccgggccggcagttcgggggccgacgccggccaactgttccagcgccatctggatgtgcaggttgatgtcactttcctgcttgtcgagcatcgagtacgccagcagacggacgtcatcactggggtcacccaaggctagcttgaggatgggcaccgcgtccttgccaggcatgcggcgagtcgccagcagcgcggccagacgctgatcgggatcgggcgcgtggcgcagcacgtcctgcaaaccaccatcggcgaagatcggcgtgcgtgtctgggcctttgcgcggaacggcaggccgggaatgccgaccgactgccacgcttgctggtcgcgtttacgcggcaggtacagcgccgggaagatcgacgcaaccacgcccagggtaccgatcaccggcacaaataacgccaggctgaaaatgaacagtgggctccacggcaaaggcgcccggtagcgcgccggcaacagcagccatacggcgccacacagcatcaggcaggccaatccatggctgaaggtgaacaccagcagttggtgcatctgcggcgcgtcgagccacaggctggcccaactgcccgcctccagcagcacggcgccgctaaacagccacttgctgatcattcaggccacactcgttgtagaggaagttacgcagcccgttgcgatcacagccaggctccagattgaaaggcatgacccgcacacccaggctgtccaggtcggtatcggtaccaaagtgctcgtgcaacaacatgccgatccgcgccaggtagccttcggtaccttccgggctggtcagcggcaacagcaccagcagcagacgatgttcgcggttgttgcgtaccgccaggtgcaagtccaggccacgttggctgcgctccatcaagcgcgacagttcctcattggcgcgcgtcatctcgaacgcgaacaacccggtgggcaacgtgtgttgttccacatctaccagcgaccgcttgagctgcaacgaaaattgctgggcgtgcgcatcgggcaggctcagcacttgcggatcgcggcgcaacaggtcggcaatgtgaccggccagcagcgacaacaagctcaaggtgcggtcctggaacgcaaagaacggcatctgccgaaccgccaggatcgccagcaagcggccttcggcatcgatcaacgggatgcaggcctgcagcgcggaaaactgcgcggcgttaccggcgtcgatcagctcctggcgtacgctcaccagttcgccgcgctccagacatagccggatcaaaccgtcatcggtctccagcggccccatcacgccgatcatcgccaaggcctggggcagtaggtttttctcactgtcgtcgacgcggtacaaacccgccacgcgcaatgcaccgtattggccgagcatcgccacgatcggctcggccagctcgctcaatgcgtcgccttcgaccggcatgccgcgcagtttttcacgcaggcccagcaacgagctgcgcaggctctggtcactgccggccacgcgttgctccagcaggtcatgggacacccgcaggatctgatgggcacgggtgaactcgtcgaggcggtactgacggtattcgttagccatctgcagacgctccaggcggcgcacccacaggtcgcgaacctcgcctaccaacatcccgcacaccagcacaccgacgatgaacgagggctcaagctgggtataacctgcatgcccggtgtagcgcagggcaaacagcgccgccaccagcagcacggcgctgaacaggccgcgcacaaaaccgtaacgcacacccaacagcagcggcgccaggattggccaggggaaaccaccgtgcatttgcaacgggtcttcgggggtcagccagaagccgaggccaatggccaagcccgttaccaggagtgtttccagccaagacaccggcccgctggcgcgaggcgccaggctgtaatccatgtgtggagaattcattgcgttcactcgaatcgaagggcgccaaccagtttgtcgattaccgtctgagcattgcccgccaggctttcacgggaccaaccggcgcgcgcgccgcttttgctccagagcacacgaccactgttggcgtcgagtacgcgcaggctgatgcccaccgccggctcgccatccaggccgttcttgtactgccactcttcgacgctgccggcgacgacgtaatcgagcttctgctcacgtgcccattccagggcaccgttcaggcgctcgttgtcgtccatcagcgcctgttcgccctgggtgctggtcgggtaaacacgcggttgcaggccatggctgctgagtacgctgagcaggatctgctcgctgcgctcaccagcttgcggggtctgcgaatagttgatcatcggcacgatcccccactgcgcgttgcgcggcaggttagggctgttttcactggtgaagctggagcagccggcgacgaacagcactgtcagggccaggctcaggttacgaattgcttgcataggtttttctcccgtagattctgtaatcagcgcccgaaacgcacgccgtagctcatgcccagcgtgccgccggacttgccatccccgccttgtggcgcagattggtagccgaaggtgagggccagttcgtcgtcacccagcacttcgaaaccaatgcccgtgttgacgccatagttgaaggtttggtcggtccactgccagcccgccgtcatgtccaccagccaggtgtattgcggcttgctgcgcaccagcgcaccggggatgccgcgacgccaggacgtgccgacgtaaagttgcccgtagcggctttgcagcaggtcgcccgacgggatggtctgcaactcgatcgggtcacccggctcaggcggcgcgacatcaggcactcgtatcgggcctttgaaatcgctggagaggtaatccaggttgcgatccttcacgttgttcttctggtaatccacaccactgcgcaccgtccagttaggcccggcaaattccagcgtgtggttaagctccagcttcagcgcatgaccactgcccaacgagtcgccggcacgggtcgagaacgagcgctgtgccacttcccagctcaactggtcccgcgcggtcaggccatgacggccgccgacccaggcgcggtcctgctggccgaaagcccgcatcaggccgctgtcgtcgctcttgcgatgccagtccagcccggtctcgatctggtggctgttgcccaactgccacatgcgcgacaggcccaggccgttacggtcgtcgtccttgcgttggctggtgtcggcaaacagcttccagctgccgttttctaccgagcgcaccaaggtcagggccgcgttgctctcgtcgccgatgcgcgaagagatgacgtcgtcgcctttatagttgccgtgttccatctcgacatcggcgtaccagttgtcacccaggttgtgggcgatttccaggcgcggcgcctcaaacgacaagccaccgaaatcctgcttctgatacgacagcaacgcaccttgcggggtggcttcgtggatctccaccgcctggcgacgcagttgctcgttcaccgaatccggctggtcgtcgcccagtgccgacaggctggtttccagtgcctcgttggtacgccccaaacggctgagcgcctgtgcgcgctgcgccgggttcaggtcgctgctggccaacagggtttcgacctgggctttattgcggctgcgcaaggcttcctggatttgctcgtaacggtcaaccttgagcccttgggtgcgcgcccaggccagccagtcgtctttctgcgcttgctggttggtcgcatccaggcgggccagcaggcgttcgaaccacagctgtttcatcgacggcgaaccgtctttccacttcagcagttcttgctgggccttctgcggcgagtagctgctcgacatcaagcgcagccagatcgcatagcgttgggacgacggttgcaagttgtcggcctcggggctgcgcagcaacttcaagcgcaggcgctgggcggcgtcctggtagccggaggtgtctagtgcgtcggcatacgcagcctgcaccagccagtcgttcgggctgagcttgaggtacatgcgataccaggccaacgcctcggcatcgcgccccaacagctggctggcactggcgaacggcagccagagcaggcggtctgcccgtgcataggcacgccatttggccagcaggggcttgagttttgccgtgtcggcctggtcgacatacagccaggtcaaacgctcgcggaacaggttgtcatcggggtagcgcgacaagcccagcagatagaggcgctcggcctcggagggatcgccctgctccaccgccaaggcaccgcgtaccgccagaacctgggcttgctcgtaggcctgcgggtattgcttggcgtcttccagcagggtaacgacctgatcccactcctgcagctcctgggccagttgcagcgcctcgaccaaccgttgcggatcctgggcgcggtgccagctgtcgaccatcaacttcaaggcgcgctgcgggtcgctggtgcgatacagggtgatcaactggctctcgtcaccgctggtcagcttgccgttgagggacagcagtttttccagggagacgcgcaagtcctcgtcgcgctccaggtcccaggcgagcgcggcacgggtgcgccaatattccggatcatcgatggatgagtcgtccgacttgaccacttcccaggccgccggctcatcaaacagcttcatttccgtgctggcccaatcgacccgctcggcggtggtcagcttgtagcgttttgcatagtccttgtagagcttgcctttggccgcgaactgcccggtgttttccaggttctgcagcaagcgagtccaggccaggcgatgggccgggtacttgcgcaggtaggtgcgcagccatgcctcggcttcggccggtgtgccacgggattcatgaccgtagatcaacgcatccagctcgatgtccgtgagcgcacgctgctgcatgatgtcggcgagcaacgggaccgagcgggcgaagtcgaattgcaggctggcaaggcgccaggcgtgctcgcgggttttcgggtcttccttgagtttgagcaagcgaatccagtaatccagcgcggcttcgttatcaccgcgccactcaccgagcttggccatttgctccagcaactcggtgtcatccgggtaatcgatgaccaactcctgaccggtttcccacgcacccgccagatcattgatggacaggcgcacctggaattccttgaccaggatcttgcggttgtcaggctccaggtcatgccactgctggagcacgcgctgggccaggtcgaactgcttggttgcaacggcgatatccacgccctgctccagccacgccacgtcggtctgcgggttggtcagctggggcaactcgtcagccagcacttgcgcggcctgctcgtcacgaccggccgagagcaggctgttgaacgcaagttgcgcgtactcccgccgttcgcccggctgctgggcgtcacgcttgagttgcagatagatgtctgccgcgcgcgcaggctgctcacccgccaagtaccactgcgcggctgatttgagcgcctcggtgcgttgcgccgggtcacgccctgcgatctcttcgaacacactggcggcaaacgccggcgcctgcagggtcagcgccagcttcgccaggctttgcagctgggccaccggcagcttgcgatgatcgaagctttgcaggcgctcgaccaacgcatgctgcgcaatcaggtcgttgccactggcggcgaccagcgcgtccagttccaggcgatagtaggcctgaatctccggctgcggcttgggccaggcgtccacgtgttggcgcgccttggtgtagtcacccaggcgaatcaacaagtcgaccaattgcaaacgcaggtggtcgtcatccgggtgcgccgtcagcaacagctcggcatagttggccgacacggcgtcgggttcgcgcccgtcaggctggaacacttcttcacgctggaaggttgcccacagcaggccgcccacggcgaccgcgaccaccgccagtgcccatgggttgagcaggcggctgcttttagttgcagaggagttgaccattactcacctgcttcataggaagttgaaaagtccaaaggccggccgaagccttgcccgcgaatcgttgcccatcgacttccacgcggcaggcggttgccgagcgcacggtgaaggtcaggtcgaactgaccggcgaaggaaaagctcacgcgacgatcgtccaggtaacgccaatcgagcaacggcacgttggcctcctccagcgcaggacggggatctctgtccgcacgcaatgcgagcaacgccttgtcgctgctcagggccacatagcgcccttgcggcaagtcacgtacacccgcgacaccttgggatttgagcaagtccggccagcccatttgtgcatccaggcgcacggtacgcagcgcgtccatcccgcgaatctgccaggcgccgtcggccgtacgggccaggctcgcctggtacaagccatgcagacggtcgacgtagtcgctcatccacaacgacatcggctgttgctcgcgcatgtagccgtagatctcgtgcatggccttgatcgaggcttgcttggtactggaatagaagtggtagtagaggtgcagcccgcgcaggcggcgtgggctgtcggtgagctcgaacgtctcgatcaactcacggaagccgtagtacgggcctttccacaggttggtgtagaggttttcgttgatgatcggcgcgtagtactgcaaccccccaagcgtcggccgcagcaacgggttcagcccggtcagcgacgggttggccttggtcatgatggtttcggcgccgttgacgtttttcaagcccgcgtcataggccagcttgatggtgctggcggatggcagcgcatcgcctggccagaacaccatcttcaccggcttctgtggcgtcgtcaggttctggttgatgtaatcgcgcgagccaaaaatctcccgacgaaaatcgattttgtcgtagccgacgattttcatgttcaagccgtattccgcgttgaaattctcgcgcttcttggctttctccggctgcatgaaaaacgggtggctgtaggtgtgcgtggccacttcgactttagggttggcgaagatctcacgggcaatcggctccagctcgcgggccaggaacgggaacgcgccgcgcggcgagatctcgccctcgatgatcgacaccgaggtcaggaacgggttgggcttgatgtaatcgtccagcgtatgacgacccgcatagggcgtgccacgcacttcggcgcgggagggaaacccgtcgccatcgatgtgcacggtcgcaatgcgccggccattctcggtggtggtgtccggccgaggttgcgccggtagacgcaggctggcctgaaggaacgcgaacggatcaagaatccagcggctacgctcgttgttgatttcgagcaggtaaggcgccagcgccaggcccccccatttaccgaccaccaccgggttgaaaacagcgccattggcaccgctcaaggacaacgccggggttgggccgttgggcaatacagagaccgccgccaggtcacgggagcgcggcaccaccggtgcctcgaatgcgcccagcagggccttgtcctggtgggtgatggtcaacacttgagtggcgggcggcgcatcccgcttgaggcccaggcgcttgagcaacaacttgtcttcaaccggcaggccactgaagaacaccacgggcacctgttcgtcgagacgggcgttgataaagcgattgaacgccggtgcatcctgcggcgggccgctggtcatccaggtgaccacacccgcgtacaagccactgaaaccgtagagcggcaggtcactgtcggcaggcaggtaatcgactcggtaaccgaggtactccagcaatccgcccaggttgctatggccggcggcatcttccagcgcgccttcgcgcgggtcgtagatcatcgcgatacggcgcggctgcacctcgatgctgctgatgcccagggtgttgaggtccggggtactgatgtagggaatgaacccctcatcgcgcagacgcttggcgagcgtgcgcgcctcctcacgacgctcgggtggcaagtagtcgatggccaccagcggcacacccttggcgcgcagcggttgcaggtgggtttcgagccactggcgatcggactcggacaccgggcgatagcgtttggcggaagcatcccaaccggcatggatcgactcgaccgccacggcggcggcaacgccgtccagctcaggcaacacttcgaaaccacggttgaagaacagcttgaggttcggctgacgcttgtgcagctcacgcagcaagctggccaggccgacgcgctggctctcgcgcgaagcctcgggcatcagttggaaactgtcgagggtgtccaggaacaggcccgcatagccttgcgcttcgagggccttggcacgtccgaacagatgctcgcgccagaccgtcgaggtgagatccatcacctggctgttccaggcgtcattccgcacaggggaaaccgctttgctcaacccggctttctcgacctcagccttattgccgtcaaactcaccgatggacaggtaggcaaacggctggctgcccaacgcccgcaaggttttcacatcgccaggcgtcatgtgccccggttcgaccacggcccagtcgaactgcgccagttccggcagcggtggttgctcggcgtaccagaaagccacgctgttcggttgggccaaggcagcagcgtgcacgctcggcccgccgacgaataaggcaagagcagccaacagccgctcagcgatcgcgcggatacgcgtcctgcggaaaacgatttccataattcactcttgaagatgactgagccgatactgcgtagacgtcgggcgaagtgaccggcgagctacaaactgcgcaaaagctgcgccaaaccctggccaatggaggtcggttgcgggagtgcaaagcgctccagcagacgggcgttatcagcgcgcgaatgacggatgtcgccttgacgtgaagcttggtaggtcacgttcaacgcggtgccggtggcattgcccagttcagcgatcaggtcgttgagactggtcgaacggctgagccctacgttgatggcttcaggtgccggttcgcgggtctcgactgcctggacgaggatgctcaccaggtcctgcacgtagacgaagtcgcgggtttgctcgccgtcaccaaagacggtaatcggcttacccgccaacgcgcgctcggtgaagatgctgatcacaccggagtacggcgaagacggatcctggcgtggaccgaagatattgaaaaagcggaagatcaccggctcaaggccatgctcgcgacggtagaagtccaggtaatactcactggccaacttgtcgctggcataaggcgtcagtggggacttgggcgtgtcttcggcgatggccgtgccttcgccgttgttgccgtaggtcgccgcgctggaggcaaacaccacacgcgccacaccggccttgagcatgctttggcacacgttgagtgtgccgacgaaattggcctggtgagtggcgacaggatcgtctaccgaggcctgcaccgacgcaaccgccgccagatgcacgactgcgctgcaatcacgcatggcctgctcgaccacggcgctgtcggcgacatcgccaaccagcagttccagatcaggattaccggcgggcaggttagccaccttaccggtcgacaagttgtccaatacgcgaatcttgtagcctttgcccagcaacgcatcgaccagatgtgaaccaataaaacctgcaccaccggtgaccagaattcgtcctacagccatgaagtttacttcctaaagacccgagcgcaggcagcgacaaacgagcctgctaattaaaggtgacagtgttttagggctaccctgaccaacgtcgcctggccatccgagtccaagccgccttatccctgaatcttgaagaaccacagcatgggacgaatgcgcgttgctaatgtcattttaatggcttagagccatcaaattcgtggcgatcatggtggatccaaaagagactgtcaatgaattgtctaatttgccgctaaacggcaacaagcgacaaaatcagccacttatttgacgctggtaatagggcgcagcctgcttgtcacccttcaaggcatcacgtctactgcacccatattggtgtcccaggctgtgtggtcgaaacgacttgcgtgacgattgctgcctccgacttcatgggcggctacacggtgttgggcgatgaaagcgggcagtttctgcccggtttttcagtgttgggcagtgctgaggcgcgattgcctgcgcaggtacaacatttgcgccgtcacgccgatcaccagcaccaacgcaatgcctgcctgcgcacccagcagcaccggggatttcaggtcagtgacgaaggggtggccatcgggaacgcgacgcaacgtctcggacacggtgggcaccatcaggaaaaaagccgtcaggctcagcaagatcgtctccacatacacccgggcttgccccagccaggccacgcgccctaccccataacccgccaacagcagcgtaatcgtaatgatgccgatggcgttgctgacgggctgatgcgcgaccaggaacacggtgaggccgccgatcaacatcgacacaaaatacaacacgcccggcactgagcgcggcacgatgcggccatgccggataaacatgtaggcggccagtggaatggccggcaagctgccgagggtgtgcagccagccgagagcggagattccgaacatagtggtgttcccatgtggttggatgatgtgcaaaaacggtcagcgcgggaaaggctcatcccgatggcgccggcgcgctatgatctcggcggtcagcttagtgagggcggggtcgaaccgacatgatgaatcccctggaaaacttgatcattcatccacaaatgcagctggaagggctggccaagggcgacctgctgtcccaggtactggcgcagatccgcctgacaggtgatcgggtctattcctgcacgctgacggaggcacagcccctcacgctggatgaaaaaagcgcgcacatctgcgtgctccagcacggtcggttgcatctgaacgttgcccatcagccacccctgacgctgcagcaaggcgatgtgatcctgctgccccacgaccccaagggcattacgctgaccgccctgaatgggccggcaaccgtggtcatctgccgcttctggttcgacgcgagcagcttccaggccatgctgttcgccctgccgcggctgatccatatccagcaagccgacgccgccgcgtgggcggaaggcattctgcatttcatgttgctcgaagctcacgacacgcaaccgggcggcgcgttgatgatttcgcgcctgatcgacctggtggtgattcgcatcctgcgcacctgggtgcaccagggcgccgcttccggatggttgggtggactgtcgaacgcgcgtatcgcgcgcgtgctgaaagccattcacgaaacaccaggcaagcaatggcgcatcgacaatctggccgaggtggcgggcatgtcgaggtctaacttctgcgaacgcttcagcgccttggtcggccgctcgccgcttcggtatcagaatgaatggcggctgaccctggcaaaaaccatgctggccaaacaggacggccgcatcggggaagtgggcttcgcgattggctacgcgtccgaggccgcgttcagccgggcttacaaagcctttttcggccgctcgccacgggatgacaacgcccggccgggttaggccgggacgtgtgtatcaatgcccggcgctttgcccgccgtctacatgcagaatctcaccggtcacaaagccggcggtttccaggtagacgattgcctgggcgatgtcactcacttcccccatgtgcccgaccgggtgcaattgccccaacgccgcgtgggtttctgcgccgtgcatcggtgtcttgatgatccccgggctcactgcgttcacccgaatcccgcgcttggcgtattcaatcgccaaggatttggtcgctgaattcaagccgcctttggtgaggttggcgagtaccgacggcacgccgtcaatggcgtggtcagccaggctggtggtgacgttgacgatgtggccggcgccgtgtttttccatttcggcaatggcgagttgggtgatgtagaagaaaccattgaggttcaccgcgagcacgttggcgtagtcctcctgggtgtaatccgtgaaaggcttggcgatgaagatgccagcgttgttgatcaggctgtcgatgcgcccgaaggtggccagggtgtcgcggatgatgcgctgggccgtggccggatcggcgatgtcgccggcgacggtgaggatgtcggggtcggtggacggctggatcgagcgcgaggtggcgaccacgcgataatcgagggcacggtaggcctggaccacagcggcgccgataccttgggacgcgccggtgatgatgacgacttttttcatgatgatgctccggtagggattcaggcttgggatttgcggtattcggtggtggtgatgccggcgtagccccagttatcggtgtcgacttcttcgatgacgatatgggtcaggtccgggcgtttgtgcaggacccgttcgagggtttcagtgaattcggcgatgacctgggctttttgctccggggtaacgccgtcacgggtaatgcgcaggctgacaaagggcatggcgaagactccagtggccgaccatcggggtgacgggcaggcagtggggccaatttaggcttgcgccgggaggggataaaggtgggcacgggtacttcattagtgattcgatgtaacaagtctgccctgcacagacgggcataaaaaaccccgaaccagtcggggttttttatcgcctgaaactcaggcgcgacgccggatcaattagaaaacgttgatcgggtagtcggcgaacagacggatttcgttaccgcctacgttgtagttgctggcgttgttggacacgcgcaaccacgacgcgcgcgcgcgcaggctcaggtctttggccgggccgctctggaccacgtacttgaactggttccagatttcgcgctcggtgccgtcgccgcggttggtaccgtcgtcgatgttggtaccacgcacgtaggcaacgttgtaggtcaggcccggcacgccgaaggtggcgaagtcgatgccatagcccacttgccacgaacgctcgtccttgccgttgaagtcggaccagtaggagttagccagcaggatggtgttgccaccgtcgccgatgccgccagcgttgcggtagccgccgtacaggtagccggtgtcgccggtgctgcgctggtgagcaacggtgaagctgtgcgggccaacggcccaggtcgcgcccaggctccagatcttgttgtcgcgcgcgtcttcactgccttggttttccagggcgaagctcttgtccagcttggttttgtagccgttgaagtcaaaagtcagcgactgcttctctggcagggccagtacgtagttgacgttgacgtattgcttcttcagcacgtcctgcatgtcggaggcgtacagcgcggcagacaggctttcggtgaatttgtagctaccaccgatgtagtcgatgcttttcaggcgaccgctgtcggtgccttccgtgctcttgcgcgcttctttggtgaagtgacccgcgtccagttgcagaccggcgatctctttggaaacgatcgaggtaccggtgtaggtttccgacaacagacgggagttgtcgtactgcagcacaggcacggccgggaactgatcaccgtacttgagcacggtgttggaaacgcggaacttcacggcagcgccgcctttggccaggtcgtgtggtgccgagccagggttgttggcagtgccattacccggtttgaagaagtcgataccgcccgcgccagcgcgacctttaccaccgtccaggcggatagcgtattggccgatcacgtccacacccacaccgacggtgccctgggtgaaaccggactccagcttgccgatgaagccttggccccattcggctttgtcttgcttgccgtttttgtagtcgcggctgatgtaggcgttacgtgcggcgatgttcaggtggctgtcttcgataaaacccttggactggtcctggtcgtttgccattgctgtcgatgcgctcaaaatccccagagcgatcagactcatccgttgcttcaacattttcttgtattccttattcctggttgagtacgcgctgtgacaccaggctccgtaatgctttttctggtgtcgactgaatccggaaaaaagaaggcccgcggacgactgaacatgccgcgggccttttttattggatgagtcatggcggttagccacaggcgttgggcgcaatcctagtcgcgcccggaactatgtgtcaatttcgcgaatcgtctgtatttaggcgaaataattctaagcgnctgaatccggaaaaaagaaggcccgcggacgactgaacatgccgcgggccttttttattggatgagtcatggcggttagccacaggcgttgggcgcaatcctagtcgcgcccggaactatgtgtcaatttcgcgaatcgtctgtatttaggcgaaataattctaagcgcaggcctacaaccacattgaaagcgacaaaaaaccgcatgcaaaacggcaaaaaacacattccgtaacatatttaaaagccgatacgtttggcaattgataacgcgcgcaaatgcaaagcattaccattaacgcgtagttttcctcccaaaccattcggatacattccttaatgcctgcccctcgcctgacgcccatcacccttgggctttccgttctgctgtctgccggttttgcctgtgcggccaccaccttgcccgaaacctcgatcagcgccgaagctgacgaagacgacccacgcgtcaaggaaaccagcaccgccacccgcaccgctacgccggtgcgttatgtgccccaggccatcgactcggttaagaccgaaagcctgcgcgcctacggcaccaatgacctgggccaggcgttgagcggcattcccaacgtcagcagcggcgccgacacgcgcttcgacagcctgcgcatccggggtttcgatgcgagcaacgacttctacctggatggcatccgcgatgacagccagtacgtgcgcgacctgcacaacatcgagcgcatcgaagtgctcaaggggccagctgccgtactctacgggcgaggcggtcagggagggatcgtcaaccgtgtgagcaaactgcctaccgccggccacaagtcgagtatcgaggcccaaggcggcagcaacgatttgcgcagcctgtatgccgacctcagcaccgaccccaccgataacatcagcctgcgcctgaacatgggcaaccaggacaacaacagcttccgcgatggcgtcagcggcaatcgccagctgttcgcaccgtccatgagctggcagctcacgccggacctgaattggctggtgcaatacgaatacagccgctacaaccgcacgccggaccgtggcattcccggggtcaacggccggccggcggatgtgagccgcagcaccacctacggcgacagccgcgactacatcgacgacaaatcccagtccctgcgctccaagctggcctatgagctcaacgacaactggcaactgcgccagaccctgggcgtgttcaagctcgacagtgatttcgacaacacctaccagaccgcctacgtgcctgcgaccaacagcgtgacacgccagcgctggcagcaagacctgaccacgcggaacctcttcaacaacgtcgaactggaaggcggcttcagcaccttcggcctggaacaccgcctgctcaccggcgtcgaaatgggcagccaacgccgcgatccgaagctctacaacggtggcaacaccgtgccgagcctcaacctcaaccagcccaaccgccacctgagccacaccgggcggatgagcgtatccagcaacaaccacaccgaagtggaaagtcgtgcggtttatatacaagaccaactgcgcctgaacgatcaatggcagctcctggctggcctgcgttacgaccgctttgaagtcgataccaagaacaaactcaacaacctccagcaagatgtcgacagccataacgccagcccgcgcatcggcctggtgtggacgcccctggaaaaccactcgttctacgcctcgtggagcaagacgttctccccagccggcggcggcctgatcggcatcaccccgagcgccaccagcggcgccaacgacctgagccccgaactgaccaaacagaaggaaatcggggtcaagagcgactggctggacgaccgcctgagcaccaccctggcggtgtacgaactggaactctacaaccgccgcaccagcgacccgctggaccgcaccatcaccctgctcagcggtttgcaacgctcacgcggcgtggagctgactgccaccggcaagatcgtcggcaactggtacgtacgcggcggtatcggcctgcaggacgccacggtggtgaaggacaacaacggctttgaaggcaagcgcgtcagtgatgtggccaagcgcaacggcagcctgtttatcacctggaaaccagaaatgggctggtacgccgaaaccggtttgacgctggtgggggatcgttacgccgacagtctcaacaccgtggtgctgccgggttatggccgttgggatgcgttggccgggttccgccagaaggaatgggacgtgagggcggcgctgaacaatatcgcggataaaaactactatgcgtcggcgaccagcgtggcgcagatccagccgggagagccgcgcagcgtggtggtgactgggacctacagtttctaaaccgaatacatccaaaaggtgtagcaaggggcttccccccgatggcaaccggtcggttgatatttttgcctgacacgccgctatcgggggcaagccccctcccacatttgttctctgtgttgcttagtttttcagcaggtcacacaacgcgtgcacttcatcctcactgaacaaccccgccggatagcgtttactcatcacgctgcgcaagtcaggctgttgcctgatctgtcgcgaaccgttttccttcaaccagagcgccagcgcatggatcgcgtcgccgttgacccgcaaggggtggaacgtgcgcgtgtacatcaggttgatatcggcattcatttcagcgctctctcctactgcgtgagcggctaacttactcaaggtttatgacagaactgcgcagtcattaacttgggccactgtgacgacaccgatacaagagctatgccaatgtctcgtgtttataggcatacgcacacaaaaaagcccgcgaccttgctgggccgcgggcttgctgtaagcgctcgaaccagatagcccctggctccggttaaagcactgttacaactgcactcaatttttgtgcggagcaggctgttgttgggtcaggcaatggatattgccgccccccagtaacagttcgcggcccggcaccatcaccacttcgtgctgcgggaacaggtcctgcaggatcgccttggcctggctgtccagcgggtcgtcgaagcttggggcgatgatgccgccgttgacgatcaggaagttcacgtaggaaccggccaggcgcacggtcggattgcgctcctgggagccgtcaaccgggtcgacaccggcgcattcttcctcggtggcgtacagcggccccgggatcggcattttatgcactgtgaacgagcggccctgggcgtcggtgctgctttgcagcacgtccagggcggcgtggcagcgcgcgtagttcgggtcgtgcgcgtcatcggtccaggccagcaacacttcgcccgggcgcacgtagcagcagaagttatccacatggccgtcagtttcgtcgttgaacaggccatccggcaaccagatgattttatccacagccaggttggcgctcagcactgcttcgatctcggcccggcccaggtgcgggttgcgattgcggttgagcaggcattcttcggtggtgatcagggtgccttcgccgtcgacatggatcgaaccgccttccagcacaaaaccttcggtgcggtagcgcggcgcgcgttcgatctcgaggatcttgccgccaacctgggagtcgcggttccacggcgcatacaagccgccgtcaaaaccgccccaggcgttgaaatcccagttcacgccgcgcacttcgccgctgttgttgatcacgaaggtcgggccggtgtcgcgcacccaggcgtcatcgctggacatctccaccacgcggatattcggcacatccaggcgggcgcgggcgttttcgtactggccggcggatacggcaacggtcaccggttcaaaacgtgcgatcgccttggccaccgccacatgggcagcctgcgccggcttgccgcccaggcgccagttgtccgggcgctcgggccagatcatccaggtttgcgtctgtggcgcccattcggcgggcatgtggaagccatcggcgcgaggggtactgtgcagggtggtcatggcggtcagggctccgaatggggtaaatgccgactttataacggataaaaatcggctttaaaagcaacagaaaatcataggcggtaaatatgacagcaaataaccgataacaatcgattaatcacaattgctcatccagcaccttcgacagcatgtcgacaaagaagtccacgctgcgcctcgacgtgaccatcggcggcttgatcttgaggatgttcagatagtcgccggtaggctgcatgaaaattcccaactcccgcagacgatcacacaacaaggtggtttcttcggtggcgggctccagggtttgccggtcgcgtaccaattccaggccgaggtaaaacccggaaccgtggacggcgccaaccaatggatggcgctcgatcagagcttccaggcgagccttgaaatgcccgccgaccacttgggcgttttcccacagtttttcttcctccatcacatccaacacggccatgccgatgcgacaactgaccgggctgcctcctgacgacgagaagaaataaccttcagcctccagcgcttcggcgatttcacgccgggtaatcaccgcccccaggggctggccattgcccatgcccttggccatggtgatgatatcgggcaccacgccctgctcttcaaagccccagaagaagtgccccatgcggccatagcccacctgcacttcatcggcgatgcacacgccgccttgggcacgcacaagcgtatacacctgctgcaaatagcccggcggcaacgagataccaccggcattgccgtacaccggctcacagatgaaaccggccaactggcgtttgcttgcagcgattttcgccaggttgtgctccacacttcgtacgtaatcgggcgcactgtcctgcccgcgaaactcgccgcgataggtattcggcgccgtcaccgggtgcacccagtccggccggctgctcaaggcctgggggttgtcggcaatcgaggtggacaccgcatccgccgccaccgaccagccatggtaggcctccagcacactgagcatgtcgcgcccgccgctgtaggcccaggccaggcggatcgccaggtcattggcctcggtgccgctgttgaccaggaacacccggtccatgccctccggtgccagcgccagcaagcgctcggaaaactcggcaatcgccgcatagtgaaagcgcgagttggtgttgagcaacgaccactgccgcgccgccaccgccgccatacgcgggtggccgtggccgagtaccgccacgttattgagcatgtccaggtaggagcggccctgcatgtcgatcaggtggttgcgccagccgcgctcgatacgcggcgggtcgacgtaatagtgcttttgcgaacgggcgaaactggcgtcgcgccgggccagcagggcctcggggtccagctcgggctcggcgtcgcaggccagccccagcagcgcagccggcgatgggcacagtgcttgccacgccagtgcccgggacggtgcgcagaacagcggtgcgggcaagtcagcccggcaaagctgtaccgtcagcggcccctcgacctcaccgatcacctggcccttgagcaccgcagcccccggctgcaaaagcggctttacaccccacagccgcacggtcgcttcgctgttatgcacctgcagttcgccattggccccccgtcgcaccacaccggcaaacggcgcttcgacggaagtcgccaacgacacgtgcagttcaacgtgcaacgggaacgtctccggctcggtcgcactgtcgggccgagtacacgacaaccggtactgcccatagcgactcgccgccaagccatgcaccgccgccgcctcctgcaacaggcgctgatcgatgccgggttgctcccagttgccggcctcgaaatgcgggctgagcacgcccaggtcgatcagcgcgaactcgcggcctaccaaccccggcaacaaaggagcaaagccttggctggcgacgggtgtgggtgcctgaccaacactgctgagaatcgccgcttccatcagctcaaacggcaccgaggtcgctacatggaagatttcccactcatgcccggcatttttcaacaggtagctgttatgcggatccagccgttgttgctgctcgctgctcaagaccagcaccgccgcgcgggcgacgatcagcggccatagcgcctgtaattcttcatgctgcaacggcgtcaccgcatggcaagcctggaccgccggcaagatagcaaaggggtcgccctcggcatggtgcagcagcgcggcgcaggtcaccgacagatcggcaatgcgccaggtgcgcaccaggtcgccgaaatcgatcacgccctgaagttgccagtggcgttgcgcatcacgctgccacaccacattgtcgtcggtgatatccatgtgcacggcttgccacggcaggtggtcggccaggggacgcatacggtcctggacctgctcagccacttgttccagcgcttggcggtgaggcaaatcttccagggttgccagcagatgcctgatcaattccagggcatggcgcgggtcccattgcaacgtacgctccaggcccggatgttcaaacgacgccagcgcctggctcatccgaccgcaaaggtcgccaaagcttgcgatcaccctgcgccccaagtggggcagatgggtcaacggctggccgtcgatatagtccagcacccgcacatgcagggtttggccgtcgagggtcagggtcagcagttcctcacctgtcagggccttgatgaccttgggtacgcgcaccgcctgcaggctgttgagcgccgcgtgctgggcctgaagctccaaggcagcgtagtcgccccggcagattttcagaacgaaccgaccacggggactgtcgactttgtagttaaggtcttgctggctgcccagcgatcgcaacgtgccactaaggccgtaatactgctcaagcaatcgagccgcctgatcggggctgacttgcgggcagggtagactggcgcgatggatcagggtggcgagcaacatgggggtggcctcggtttttaggggtgtatatcgccattgttcagggggcttacgcaaccccctgcgcaaaccacgcttgcaccgctcggcgtcacaactcaagctatgctccattcgcttaatgtccgtctaaggaaaaggccctctgacatgcgcattctcatcaccggtggcgccggttttattggctctgccttaatccgccacctgattcaacacaccgagcacgaagtgctcaacctggacaaactcacgtatgccggcaacctggaatcgctgaccagcatcgcgtccaacagccgctacgagttcgtccaggccgatattgtcgaccaggccactgtcagtgccgtactgaagcgctttgagccccaggcgatcatgcacctggcggccgagtcccatgtagaccgctcgatcgatggcccgtcggacttcattcagaccaatatcgtgggcacctacagcttgctggaagccacccgcgcctattggcagacgctcgacgagcccgccaagcgcgcgttccgcttccatcacatctccaccgatgaggtgtacggcgacctgcatggcgtggacgacctgttcactgaaaccacaccctatgcacccagctcaccgtattcggccagcaaggcggcgtccgatcacctggtccgcgcctggcagcgcacctacggcttgccggtgctgctgaccaactgctcgaacaactacgggccattccacttccccgagaagctgatcccgctggtgatactcaatgccctcgcgggcaagccgctgccggtctacggtgatggtttgcaggtgcgcgactggctgttcgtcgaagaccatgcccgcgcattgctcaaagtggtcaccgaaggtgtggtcggcgagacctacaacatcggcggacacaacgagcagaagaatatcgacgtggtgcgtggtatctgcgccctgctcgaagaactggcgccacagcgcccggctggtgtcgagcagttcaccgacctgattaccttcgtgaaggatcgcccgggccacgaccagcgctatgccatcgatgcaggcaagatcgagcgagagctgggttggacccccgaagaaacctttgaaacagggctgcgcaaaaccgtgcagtggtacctggataacctggaatggtgccgcagggtccaggacggcagttaccagggtgaacgtttgggcaacaccgaccttaaggatctgattgcatgatgaagggaatcgtattggccggcggctccggcacgcgtttgcaccccattaccctgggcgtgtccaagcaactgctgccggtgtatgacaagccgatgatctactacccgatctcggtactgatgctggcggggatcaaagagattctggtgatatccacaccggtggacttgccgcagtatcgcaacctgctgggcgatggcagccagtttggcgtacgtttcagttatgccgaacagccaaccccggatggcctggcccaggccttcatcattggcgaggaattcatcggcgatgaccctgtgtgcctgatcctgggtgacaacatcttccatggtcagcacttcggcgagcaattgctcggcgccgccaagcggccgacgggcgctactgtcttcggctactgggtcaaggacccggagcgcttcggcgtgatcgacttcgacagcgaaggccgtgccctgtccatcgaagaaaaacctgcgaagcccaagtccagctacgcagtgaccggcctgtacttctacgacaacgacgtgatcaagatcgccaaggcagtcaagccttcgcctcgaggggagcttgagattaccgacgtcaacaacgcctacctcaagcgcggcgacctgcaggtagagcgcttcggccgtggctttgcctggctggatacggggacgcacgacagcttgctggaagcctcgcagtacgtgcagaccattgaacaccgccaaggcttgaaagtggcctgcctggaagaaatcgcctacgaaaatggctggatcgaccgtgaccacctgctggaacgtgccaagtacttcggcaagaccggctatggccagtacctgtactcgctggccggagagaaccagtgaacgtcgttgaaaccactttgcccggcgtgctgatcctcgaacccaaagtgttcggcgatgaacgcggctttttctacgaaagtttcaacgcccgcgcctttgaagcggccaccgggctcaagcgtgacttcgtgcaggacaatcactcgcgctcgcaaaaaggcgtgctgcggggcctgcactaccagctcgaacacacccagggcaaactggtgcgcgtcatcgccggggaagtgttggacgtggccgtggacatccgccgcagctcgccgaactttggccagtgggtcggcgtgcggctgtcagcacagaacaatcgccagctgtgggtgccggaaggtttcgcccatgggttcgtggtactgagcgatcacgccgagttcctgtacaaaaccaccgattactaccagcccagcgccgaacgcagcatcctgtggaatgacccgacgctggccatcgattgggagctgaccgaagcgccccggttgtccgccaaggaccaggccggtaaacccctgaaggaagccgacttgttcccatgaagatcctgatctgtggccaacacggccaagtctcccgcgaactgcaacaacgcctccagggcctgggcgaactcatcgtcctgggccgcgaccagcttgacctggccaatgcagagcagatccgccagcaagtgcgcgcccaccgccccagcctgattatcaacgcagcggctcacaccgctgtcgatcaggccgaaagcgaaccggacgccgcatttgccatcaacgccatcgcccccggcattctcgccgaggaagccaaggccctgggcatcccgctgatccactattccaccgactacgtgttcgacggcagcaaaccggcgccctacatcgaagccgacaccccgaacccactgggcgtctatggccagagcaagctgaccggcgagcaggcgattgcggccgtgggcggcgagtacctgatcctgcgcaccagttgggtctactccaaccacggcaagaacttcctgctgaccatgcaacgcctgctgcaggaaaagccgcagatgcgcatcgtcgccgaccagatcggtgcaccaacctgggccggcagcatcgccgacagtacgcttgcattgatcgaacgctggcaagcaggcacagcgggggaatggggggtgtatcacctgaccgcccaaggtgaaacttcgtggttcggttttgccgaggccatcggcgagcatctgcgcaagcagggcaaagcctgtgccgagctggaagccatcccttccagcgcctacccgacacccgcccagcgcccacttaactcacgcctcgattgcagccgcttgcaacaacagtggcacgtcagccagccacattggcaagacgcattgcgcgagtgtcttgcacagcagcactaggcataatgcgcctgtacccacaggcgcacgactcccatgactccacccctcccgcgtagaccccgctggcgcagcctcgccctcttggcgttgtgcctggcaccgctgttgtggccgctggagcatctggccgagcgctattaccgcagcgaactggccggccagaaccgccagaccctcgacctgtatgtcgccaacctgctcggcaccctgcaccgctatgaagtgctgccgcaaatcctgggtgacctgccggccctgcgcactgcattggacgcgcccaacgtcagcaccaacctggtcaacgccaacctgctgctcaaagaggttgccgcccaggccggggtggaagtgatgtacctgatggacaccaccggcaagaccctcgcggcgtccaattgggataaacaagacagctttgtcgggcgcaatttctcgttccgcccgtatttcagcgaagccatggccgggcgcctggggcggtttttcggcctgggcaccacctcggccaagcgcggttacttcttcgccgccgccgtgcgcgacggcgatacgatcatcggtgtgctggtggtcaaggtcgacctggaccacaccgaaagcctgtggggcaacaccccggaacaactgctggtcaccgaccacaacggcgtggtgatcctgacctcgcgcccgcaatggcgattccgcgcgacccgcccgctgaccgctgaagaacgccaggccatcatcgctatccagccctacccgactcgcgacccgcagccgctgagcctgagcaccaccgcgtggctgcgtcaatccacggccatcgccgagaccggctggaacgtggagatcctcgcgccgcgttcgttgattagccgtccggtgcgcactgtggttgccgtcggcggcgcgacgctgttggtgttgatgttgttgttgggcttgatgatgcaacgtcgccgtcactatctggagcgcattgcgttcgaagccaaggcccgtcgcgagctggaagcgcgggtggtcgagcgtaccagtgacctggaaggcctcaaccggcgcctgaaacaggaagtgctggagcgcgaacacgcccagcaggagctggtacgcgcccaggacgacctggtgcaagcgggcaaactgtcggcgctgggcaccatgtcggcgagcatcagtcacgaactcaatcagcccctggcggcgattcgcagctacgcggaaaacgccgaaatcctgctcgaccatgaacgcaccgatgacgcccgcggcaacctcaagctgatcagcgaactgaccgggcgcatggcctcgatcatcgcccacctgcgcgccttcgcccgccgcgaccgccacgcgcccgaaagcgtggccctgcaaccggcgctggacgatgcactggcgttgctggccaagcggcgacggtcgatggaggtggaactgatccgcgatttgccggaagccaccctgtgggtacaagccggcgaaacccgcctgcgccaggtactgggcaacctgctggccaacgccctcgacgccctcaccgaaaaaggcccgccgcgcagactctggctgagtgccgaaaccaccgaacagggcgtcaacctgtacattcgtgacaacggcccgggcttctgcatggaagccctggggcgcgccagcgagccgttctataccaccaagacgcgcacccagggcctgggcctggggctggcgatctgtgagaccctgatgcgtgccttcggtggcgaactgctgtttgccaaccacaaggaaggcggcgcgctgttaaccttgaaattgcgtgccggctcgccgggcgtcagtctgcaaccgtccgaggaccgcagtgtatgagtatcgataaccagattcaggtggtgttgatcgacgacgatccacacctgcgtcaggccctgtgccagaccctggacctggccggactgaaagtcctgaccctgggcgaagccagcggcctcacggcgcgcctgtcgcgggactggccgggcgtggtcgtcagtgacatccgcatgcccggcatggacggcctggagctgctcgccgaactgcacggccaggacccggacctgccggtgctgctgatcaccggccacggcgatgtgccgctggcggtgcaagccatgcgcgccggggcctatgattttctggaaaaaccctttgccagcgacgccctgctcgacagcgtgcgccgtgcgctggccctgcgccgcctggtactggacaaccgcagcctgcgcctggcgctcagcgatcgtcagcaattgagcacgcgactggtcgggcattcgccgcaaatgctgcgcctgcgtgaacagatcggcgccctggctgcgaccaaggccgatgtgctgattctcggcgaaaccggcgccggcaaagaggtggtggcgcgtgcgctgcatgacctgtcgagtcgccgcagcgggccgttcgtggcgatcaacgccggggcgctggctgaatcggtggtcgaaagcgagctgttcggccacgagccgggtgccttcaccggcgcgcagaaacgccgcatcggcaagttcgagttcgccaacggcggcaccttgttcctcgatgaaatcgaaagcatgagcctggatgtgcaggtcaaactcttgcgcctgttgcaggagcgtgtggtggagcgcctgggtggcaatcaactgatcccgctggatatccgcatcatcgccgccaccaaggaagacctgcgccagtccgccgaccagggccgcttccgtgccgacttgtattaccgactcaacgtcgcgccgctgcgtattccgccgctgcgtgagcggggtgaggatgcactgatgctgttccagcatttcgccgatgaggccagcagccgccacggcctgccgttgcacgaactgcaacccggccagcgcgcgctgctgctacgccatagctggccgggcaatgtgcgcgaattgcagaacgccgccgagcgctttgccctgggcctggagctggcactggatgcaacgccggacaaccctgccgccggtgtgctgacgtccacctcgggcggcctgagcgaacaggtcgagcagtttgaaaaaagcctgatcgccgccgagctgacccgcccccacggctccatgcgcagcctcgctgaagcccttggcgtaccgcgcaagaccttgcacgacaagctgcgcaagcacggcctgaatttcgccaaccaaagcggcgatgacgaatgaccgcccccactcgccaagaggcccccatgaaccgcgacagccgttacctggaatccatcctgcaccacgacatccccctcacccgggaaatgggcctcaaggtgctcgactggcaacacgggcggctggaactgcatctgcccttgcaagccaacatcaaccacaagagcaccatgttcggcggcagcctgtattgcggcgcagtgctggcgggttggggctggctgcacttgcaactgcgtgaagcaggcatcgaagacgggcacatcgtgattcaggaagggcagatcagctatccgctgccggtcacacgggatgcgacggtggtgtgccaggcaccggaggagaaggtgtggaagcgctttgtggcgacgtacaagcgctatggtcgggcacgattgacgctggagacatgggttgtaaatgagggcagcgaggagcgtgcagtggcctttaccgggcagtacgtcctgcaccgctgaccgccacaccgcccctcccacctttggccttaggatcgggccagggtcagcaagcgctcgcgccacgcggccttggccggcaacgccagaaagaacgggttcaacagcgatgcccgcgccgggtagctgaacggctcaccgctcaattccaacacttcgccccccgcgccttccagcacgccttgggctgcagccgtatcccactgcgaggtcggcgccaggcgcggatagcagtctgcactgccctcggccaacagacagaacttcagcgaactgccgatattcgtcagtttcaacgcgcccaggccttcgctgagcccgcccagcaaacgctcctgctccgggctggtgtgccgacggctcgcgaccacggtgaacgactcgcccgctgccggcgcttcacgcacctggatctgcttgggcgcttccttcacgtcggagcgccaggcccccaagccagcgccaccgaagtagcaacggccattggtgggcatcgaaaccacaccgaacaccacgcgaccctgttcgatcagggcgatgttcacggtgaattcttcgctgccggagatgaactccttggtgccgtccaacgggtccaccagccaccagcgctgccagccggcacgcacgctctggtcgatatcggcatcttcctcggacagcaccggaatactcgggtccagcgcggtcaggccggccaggatcaggtggtgagcggccaagtccgctgctgtaaccggcgaatcatcggctttggacgtaacggccacgtcagcgcgccagtacggcaggatcacttcaccggcctgacgggccagctcgataaccggggcaataaacgggtggcctaaaaacagttcgctcatgcgttaaacgctcctcgctgggtcaacaggtctcgtaccaggtacagcgcggccagggcgcggccttcgctgaattgctcattttgcgccagcatcgacagctcacgcaggttgacccggtccacacgcatcggctcaggttcatcgccttccaggcgttcttcatagaggtcggtggccagtaccacctggattttctggctcatgtagccaggcgacagcgacagttcggtgaggtgctccaactgccgggcgccgtagccggcctcttccttgagttcgcgattggccgccgccagcacgtcttcgccgggttcgatcaagcccttgggcaaggacagctcatattcgtcggtgccaccgcagtattcttccaccagcaacgcatgctcagcgtcgatcatcgccacgatcatcaccgcaccatagccggcaccgcggcccaccaggcgttcgtaggtccgctcaacgccattggaaaagcgcaattgcacttcctccacgcggaacaaacggctactggcgactatttcgcgggcgaggacggtgggtttctggcgcatgagcggctccttggcgtgatcgggttactataccgtggcttttccgattgtctgtgtcggatatctttacttacatgagaccgccccatgccctctttgccctggcacgccatcgacactgtcctgctggacatggacggcaccctgctcgacctgcatttcgacaaccacttctggatggaacacctgccccagcgctacgccgagttgcatggcgtgagccgcgccatggccgagatggagttgcagccgctgttcgagcgtaacgcgggacagttgcaatggtattgcctggatttctggagcactgagctgaagatcccggtacgcgaactcaagctggaaaccgctcacctgatcgccctgcgcccggatgccgataccttcctcgcggcgatcaaacaggctggcaagcgtgtgatcctgatcactaacgctcatcgtgattcgctgtcattgaagttggaacgcattgaactggcgccgtatttcgaacggttgatcagctcccacgattatggtttcgccaaggaacacccgcagttctgggatgccctgcaagcggatatcggcttcgacccggcacgtagtctgtttatcgatgacaccttgccgatcctgcgcagcgcccaggcgtttggcgtggggcatttgctggcggtgaaggagccggacagcaagaaggggccgaaggacacacaagaatttgcagcagtcgaagactaccgggatctcattgccggactctgaacccatgtgggagggggcttgcccccgatggcggtgcatcagagacacattcagtgactgacacaccaccatcggaggcaagccccctcccacatttcgtcctgcgttttactcaggaatacgcagtgtctgccctgggtagattttgtctgggtgcgacagcagcggcttgttggcttcgaagatcttgttgtactggttggcgttgccatacatcgccagggaaatcgcgctgagtgtgtcgccctttttcaccacgacgaaacgggcggcagtaacagccgggccggttacggtgatctggtcatccacactggccacaccggcaatattgcccagcgccagcaggatcttctctttctcttcctgggtggcgacttcaccggtcacggtcaccttgtcgccatccacggtggtctgcacattcggattacccagacccactttggacacgtgctccttcaactgctcactggcgtttgcattacccggcgtcaacaggtcgacaatcttttcgccggcttccttgataaagctgaaaatgctcatagtgcgcgctccttgttaattgaattccagatgcccaagactagaccagtcctacagacttgggttccagcccggcaaaagacccaaacgcgctagaatccccccgccattggaataagccctggagcgaagatggacatcaagcagctgaaattcctcatcgccctcgacgagacgcgtcacttcggccaggcggcggcgcgttgccacatcactcaaccgaccctgtcgatgcgcctgcgcagccttgaagaagagctggacctgcccttggtcaatcgcggccagcgcttcgagggctttaccgcccccggcgaacgcgtgcttgcctgggcgcgcacggtgctggcggcgtatgacggtttgcaggccgaagcggccgcctgtcgcggcaacctcgtcggcacattgcgcctgggcgtggtgccgctgtcgagcttcgatcccttggcgttgatgcagcaactgcataaagagcacccgaacttgcgcttcgagttgtcggcgctcagctccgaacagatccttgagcaactggcgagcaatcgcctggacctgggcgtgtcttacctggagcgcctggacaacgagcgcttcgactccctggccttgggcgaaacccgcatgggcctgctttacgaccaacgcttcttcagctttggcgacacgccgttgagctgggaagccctgatcgaactgcccctgggcatgctcaccagcggcatgcactttcgtcagtccatcgaccacaacttccacagccgtgggctcaacccgcagccgctgttgcagaccgatgccgtccatcagttgttgcaagccgtgcatggcggcctgtgctgtgccgtgatgcctttggatggtggcctggacgcactcaccgagcatctgcgcctgcagccgatcgaggacgcccatacactcgctcgtctgggcttgatcatgcgccgcggtgcaccgcgctcggcgttggccgaggcgtgtttcgcgctgtatcaaaaatcgcaaaacgagccttgatcgacgtcatctatcggtagatcagtactggcaattagacgcgacgctttgtcgcgcctagtctaaacactgatcaatccgccggtggtactgccccatgaacgccaagcgcccagtctgcgcggcgcccgctcttgaaacgccagcgcccgccgccagccagagctaccagtattgcaatctcgaacacacggaattcgccagcacagccctggccgaggaagtggcgttggcgattgcctacaacgacatcagccaagcggtaatgctggtgacgccgacagacctggaagactttatcgtcggctttagcatcggcagtggcattatcgccgacgttagcgacatttatgacctaaagctcagcggatcaggctctgcccagtacgctcaggtgcagatatccagccgcgccttctggaacctcaagcagcagcgccgccaattggccggcaccagtggctgcggcctgtgcggcgtggaagcggtcgaacaagcgctgcccgacctagacgtgttgccgggcgcgccattgccgcccgccgagtggctggatggcctgcgccaacgcatcagcgcgttccagcccttgggccagtacagcggcgccgtgcatgccgccgtatttatgaacggccagggcgaattgttgctgggccgcgaagacatcggccggcataacgccctggataaattgatcggtgcattgatccgccaaaaaattccgaccgaaggcggcctggcgattgttaccagccgttgcagcctggagttgatccagaaagtcctgcgcgcgggtatccagaccctggtcagcctgtcgtcacccaccggcctcgccctgcaatgggcgcgccggcataacctcaatctcatccacctgccgcagaaaagtgcgccgcgggtctacagtcctgcgatggagaaccagccatgaaccaacatcaccaagccgaccaaaccccgaccccgcgctacaagccctacaaaggcccggccggcggctggggcgcactgatcagcgtggcgcaggcctggctgaccagcgacaacgcgctgaaaaacctgcgcatgatgctcaagaccaaccagaacggcggcttcgactgtccgggctgcgcctggggcgactcgccggaaagcggcatggtcaagttctgcgaaaacggcgccaaggcggtcaactgggaagccaccaagcgccgcgtggatggtgcatttttcgccaagcacagcgtcaccgccttgctggaacagagcgactattggctggaataccagggccgcctgaccgagccgatgcgctatgacgccgaaaccgaccgctacacgcccatcagttgggaagcggccttcgacctgatcggcaagcatctcaacgccctgcccagcccggacatggccgagttctacacctcgggtcgcgccagcaacgaagcagcctacctgtaccagctgttcgtgcgcgcctacggcaccaacaacttcccggactgttcgaacatgtgccacgaagccagcggcgttgccctggcgcaaagcgtgggcgtcggcaaaggcaccgtgacctttgatgacttcgaacatgccgatgcgattttcgtctggggccagaaccccggcaccaaccacccgcgcatgctcgaaccgctgcgcgaagcggttaaacgcggcgcccaggtggtgtgcatcaacccactcaaagagcgcggcctggaacgcttccagcacccgcaacacccgctggaaatgctcaccaacggcgacaagccaaccaataccgcctacttccgcccggcgctgggtggcgacatggccatcctgcgcggcatggccaagttcctgctgctgtgggaacgtcaggcccaggctgaaggcaaggaggccgtgttcgaccacgacttcctcaacgaacacaccgccaacgtgctggattacctaggcaagatcgacgacacctcctgggatgagatcgtcgaacagtccggcctgaccctggtcgagatcgagcaagcggcgcgcatgtacgccaaaggcaagaacgtgatcatgtgctgggcgatgggcatcacccagcaccgccactcggtgccgaccatccaggaaatcgccaacctgatgctgctacgcggcaatatcggccgcccaggcgcaggcctgtgcccggtgcgtggccacagcaacgtgcaaggcgaccgcaccatgggcatcaacgaacgcccaccggtggcattcctcgacgccctggagcgtcgcttccaattccaggtgccgcgtgaaaacgggcacaacgtggtggaagccatccacgccatgctcgaaggccgctccaaggtgtttatcggcctgggcggcaacttcgcccaagctacgccagacagcccacgcaccttcgaagccctgcgcaattgcgacctgaccgtgcagatcagcaccaagctcaaccgcagccatttgatgcacggcaaagatgcactgatcctgccgtgcctgggccgtaccgacatcgacatccaggccgaaggcccgcaagcggtgacggtggaagactcattcagcatggtccacggctccaatggccagctgcagccgctgtcgaaattcatgaagtccgaaccggcgatcctggccggtatcgctgccgcgaccctgggcagcaagccggtggactggaactggctggtggccgactacagccgcatccgcgacctgattgccgacaccattcccggcttcaaggacttcaacgagaagatcaagcatccgggcggtttctacctgggcaactccgcgggcgcgcgccgctggaacaccccgtcgggccgtgccaacttccgcccgaacatcctgcccaaggacctgatccacgaacgcacccacgcgaccggccgcgtaccggacctgatcatgcagtcgatgcgctcccacgatcagtacaacaccaccatctatggcctggacgaccgctaccgtggggtcaagggccagcgtgacgtgctgttcgtcaacgaagccgacatcatccgcctgggcttcaagccagggcagaaggccgacatcgtgtcgttgtgggaggacggccgtgagcgccgtgtgaagggctttaccttgctggcgttcgatattccggcagggcaggctgcggcttactacccggaagtgaacccgctggtgccgctggaaagcaccggggatggcagccatacaccgacgtcgaagttcgtggcgatccggttggaagcggcgagtgacaatggcttgatcatggcgcgttcggcctgacacaaatccgtcggtttgcttcggttgtggcgagcgggctcgccacagggaattaccccgccaaaggaattccgggcacaaaaaaggccgcttttgcataaaagcggccgttccgaagtagctaaagactcacgaatttgacttaagttccccagcaaaaacaataagttatggaattgtgtacaactcgtgctactggtcggatttctattgtcacaattcagatacagcctcaggatcgcgccgtcatcctcttgaggtttccctaatgaagttctcctcgattctcttgttgtcccttggcctggtcagtggcgcagccatggccggtggcaccaccgaagccggtgtgggcggcgcattgggcggggttctgggttcggtcgttggccagcagctaggcggcaacaccggttcgaccatcggcgcagccttgggtggcgcgggcggtagtgcggtgggcgccgacaagcgcagccgtggcgaagccgccattggtggcgcattgggcgcggcgggcggcaacgttgtaggccgcagtgtcggcggcagcaccggcgcactgatcggctcagcggctggcggtggtgccggtggcgcgctgggcaactacatgggcaacaagagcgatgacgacgaccgtcgcagccgtgggcgtgatcaccgtcgttatgaccgtgatgatcatcgtgggcgcggtcatgcctatggccatcgcaagaacaagcaccactaccgcgactgattgttgctgaatatggagccggcttgccggctcctacagcgtgatcaaccgctgcaacgcctcgcgcaaccgcgctggaatcgtcaccggctggttcgacccgcgatccacaaacacatgcacaaaccgccccgccgcacaggcgtcttcttcgcccgccttgaacaccgccaactcgtactgcactgagctgttgcccaacttgcctacccgcaagccgatgtagatgcgctcgggaaaggcgatcgacgcaaaatagtcgcacgccgaactcaccacaaaccccaccacgtcgccgtcatgaatatccaaaccaccttgctcgatcaggtaggtattcactgccgtgtcaaagaagctgtagtaggtcacgttgttcacatggccatacacatcgttgtcgtgccagcgcgtgatgatcggctggaagtgagggtaatcggcgcgttgcggtacggtgtcaggcatcgggtcatctcgtgaaagtgagttacagatcattcaaatgggcctgggcccattcgcgcacctcggcatacggatagtcttccagcacggcaaaacccggaataccccgcgccttcaacctggtgaacagcggcacgctgatgccccccaagaaacgcgtcaggcgttccgcccctggcagttggccggtgtgttcatgatgcctgtggataaaatcaccgcacagccccatgaagttcttatccacaagtggcggcaagcccggcggcggcggtagatgcgcaacatggccatggcacactgagcaatgcccacagcgctgcggcgcgttttcatcgccaaaatacttcgccagtctctgccccaggcagtattcggtggcgaacagatcgagcatcgcgtgaatccgcgcgacttctcccacctcgtgctgcttgaagcctgtgtataactcagcgctcaatacctgtggatcgaaatcggtctccagcaggctgtagacctcagtcatctgcttgctttccagctcgatcaggccctgctcctggaagtaatccagcgccttcaccacccgtccgcgctcggcattgtgctgttgatacagtgcatcgaaatccaccgtagcccaggtcttcgcccgtttgcacacctggatgatcgctgcaacaaactgctgcctctcaccggaaaatcgcgccagcagaacctcaggctcgaccagatatttgaaacggtactcggcataaaacgcgtagcgcggcgcgatcacgcccttgagctccaactgcaccagcagcgtcttcaatgggagctcgcggatgttgctgtggtccgacaacgacctgagcaagaattcccactgtccatcgccccgcgcggcctgcaactcttccagcacccgctggattccttcctgctccggcgtatcgccgtacacgaagttttccagcacgttgagactgtcgcgattggccagcaccaggcaatcagatggctgcccatcacgccctgcccggccgatctcctggctgtagttctcgatggacttgggcaagtcgaagtgcaccacgttgcggatatcactcttgtcgatgcccatgccaaacgcgatggtggcgacgatgcaattggagcgtccacccatgaagcgctgctggatgccctcgcgtttatcgtggggcagccccgcgtgataggcctcggcctggatgccgttgcgattgaggtgctcggcaatctgctcggcggttttctgcaaggtaacgtaaacaatgctcggctggccgacgcgctcattcatccactgcaccagccggcgacgcttgtccgcaccactgaccggttccaccagcaggttgaggttgggccggtaaaagcccgtggtgactacatcgtccgaggcaatggcgaacttcgcctgcatgtccgcgattaccttgggcgtggctgtagccgtcagcagcagtgcttgtgggatattgaactggcgctggtagtccggcagcttcaggtagtccggacggaagttgtggccccattcggaaatacagtgggcctcgtccaccaccaacaacgagatccgcacgctttgcaggaagttacggaagcgctcgttcttcaagcgctccaccgaaatcatcaggatcttgagctcccccgaccgcgcacgggccatgacctcattggcctcatcgcggctctgggccgagtcgatactgcccgccgaaatgccatggcgctgcaggaaacccagctggtcctgcatcaacgccaacaatggcgacaccaccagcgtcaggtgcggcagcagcaccgccgacagctggtaacacagggacttgcccgacccggtagggaaaatagcggccgccgaacgccccgccaatatggcgctgaccgtttcttcctggcccaggcgaaactgtggataaccaaagacctgttggagggtgtcgtgcataggctgtcactccattgaccgctgagttggctcaaaaacatagcctgggaatctcggcgaatcgagaaaggtcgcatggaaaaaagagacaggatgatacacagggcgaaggatggcctagggccgaagtgggaataatccgagggaggaacaggaaggatacaaacccgatgtgggagaggacctgccccctcccacaatttagttctgtatcagggctgaatcagcggttctgcacccgctcgatcgccgtgtcatacaccgggttggccttctgctccttagccaactgatagtgacgcaacgcatccgggaactgccccgccgcttcgtagatccgcgcaatgttgtagtaggcgcccgctcgcaccgtcgcagcgttcgcgccggttgccagggcgatagccttgcggttggcccagatcgactcggcggtgttgccggccttctgatacgccaggcccaggttgccgtaggccttgccgaaaccgttgtccagctcgatagcctggcggaagagatcgatggcctggtccagcttggcggcctggtaggccgcttcaccttgcacgttcagacgcttcgcatcggcttgtgcagaagagctgaccgcaacggcggtaacagccacgctgtcatccagcaacggtttgacttcgttgagtacattcgccgcgttcaccgtcacgccactgaaggtgttgatgtcctgaaagtcgccgctgccggtcatgcggaacacggtccacaggttgccgctgcggtttttcggcacgtagtaggtgcgtaccagcgattggcccatgtacacgaacaccttggcttcgctgttggacagctggcgcgaaccgggattgccgccgttggtgaagtcatgcacggcatacacgtagctttcgccgtagtgttttttctgcagggtgatggtttccgggccgtagctgtcgacgtcatccacgtccagttcggcgtcggtgcccgtcttgttctcgaaatagatattgttgcccgggaagatcatgtgggagtcgaggtcttccggggtcttgccccaggtcaacaccacacgcaggccgtcgaggttttccatcaccgggctgatggcatacgtcatgccggcgcacgggcacttcaccaccaggttcgagtagccaggcttcttgatgatcagaagattggtggcgtcatctgcggcttcgctggtgagggtcacctggccctgggcgttggtgcggcccactacgttctgcgcaccgttgcgttgcagcaacacctcggcatccgcgatcttctggtccttgaccaccgcactgagcacttcaatcggcaattgcgccgcctggactgaaaacgcgaccgcacacaatgacatcgccgaagcaacacgcagcaaacccatgcttaactccctttaagtagcgggcggaatcgccctgcaagattttgcggtgaaacatactcttaaatgcgcccactggaggattatttatacagaatgtgacgtggtttttatcccgcctgcccgttgacgcattgcgctacaatcaagccttgctacccaggagtacgctgccatgagcgaaccgacgtttgagcaaaaacaggatcattaccacaagatccgccgttccaattacctggccagcctgcgcctggaagggttcgacacccaaccggccgacgtcgacaaaccactgccgacccgcgaagccgtccttgccaagtaccgcaacaccccacgctgatgctcgacaaatatggggtgggccaggacccgtactgctatcccggtagcagcgtcctgcgcaaccgcctcggtttgctcgatgaaccccggctgcaccaggccgagcgggaattatccgaaatcgccgtaggcaacctccccctcttccctccgccctacgacctcgaacgcctgcaacacatccaccgcatcctgttcagcgacctctacgattgggccggcgaactgcgcagcgtcaacatccagaaaggcgacaccctgttctgcaccccggaacgcatcccgccggaagcggcgaaaatcatccggcaaatggaggcagcgaactggtatgtcggggcgagccaggccgagctggtgacgcagattgccgaagcctatggcgacctcaacgtcatccaccccttccgtgaaggcaacggccgggcgcaacggattttgttcgagcagatcatcgtgaatgccgggttttccgtgaactggtggctggtgaaacacgcggcgtggatacccgcgaatattgatgcggtggcctgtgattatcgggggttggaggcgatttttgagcggtgtgtgagtaggccggtcggcaactgacacatcccaccccccctcacatcacttgcctgttttactgttaagtcactgcaagccacaaatcccggaaagccctgtaagaaacctccaaataccacgacatccccttctgaaactgcttaaaactcctgcccacccctctataaaactcacctttctctgactgaaactggcgccctttcagcagccccggcaaatacaagtgaacattgaaaggactcaacatattggctacggctcaacagctccagagtggctaagacgatgaacgaatacatcgaatggatttatctgctcctcctcatcgcactggccgccataattgacaggacaataaagctgccagtgctcagaagatggtttggactctgcctcctggtaaccggcccaatacttctgttgtatgccacctcatggatcagaggtgcacagcttgggagcctgccaataatcgccttcgtgacaggcatcgggttattgagcactcagaatatctattgcaaagtaaaagccgatcacccactcctgcgtgcccccaccatgaacctcgcccccaacttccccgaagaccccgtcatgcagcaactcctgcagcttttgcacgaagaaatcggcctgccaaaacacaagacgatccgcctgcaaacttcgatcaacttcgacctgggctgtgacggcagtgaggccaagcaactgatggaagcgctggagcaggaatttgcgctcgacctgggtgactacgacacttatcgttacttcaaccctccggtgtttgatgtatttctcaagcgtcgggccaaggggcgcggcgaaaaagtgccgctgaccatcggcatgctctacctggcgatcaagactcacagctgggacacgcagacgctggaaaacctgagctgagcgaacacaaattccaggcacactggcactcaaatgtgggagggggcttgcccccgatagcggtgtgtcaggcacagatatacaggctgataaacagctttcggaggcaagccccctcccacattcgatgagcgtgctcaaaacaacaaggaccttacatggacgtaactatgggcctgctggccgccctgctgtggggcggcacggattttctcgtgggcctcaacgcccgtgccgtgggcgtaaaacgcgcggtgtatttcggccaggcgctgggcttcctgatcatgaccctgctgttggccatcctcccgaccttcctgttcaaagccctcgacgccgcgctcagcgtctggctgctgggcatcgctgccgccctgttcaccgtctccggcgccctggcgctgtccaaggccttcgccctgggcaaagccgccatcgtggcgccgctggtgacctcctacggcgtggtgaccaccttgctgtcctgggccagcggtgaacacatcagcctgacgcaactgggctgtatcgccctgtgtgtgatcggcgtgatcttctccagcattcacaaggacaacggcaccccccataacagtccacgcctgtccatcgcctacgccatgcttgccgccttgctgtatggcaccagcttctggctgcaaggccgctacacactgccggcgctggggccgatcaccatgttgtggctgggttacatggttggattgtgcgtgctggtggtgatggtgttgaagatcaaggacggcctgaaaatcccagcgctgaaaaactgtgcgacgctgaccggggcaagcctgatgaacctcggcgggttctcggcgttttcgtggggggcaatggcgggttcggtgtcggtggtgacggtgatcagtacgttatcaggcgggatcgcggcgatcctggggttcgtatttttcaaggagcggttgtcggcggtgcaggtactgggcgttgtgctggtactggtcggcgcggtggttttacatattgccgactaagacaccgcgcacaaaaaagccgccctacaagaggcggctttttcacaacgactgaatcttacaacttgggacctgccgccttgatcgcatcgctcacttcaaacttcttgaagttctcgatgaacagaccggccagcgccttcgccgcttcgtcgtaggcagccttgtcggcccaggtgttacgtgggttcaacaggccggtttcaacgcccggtacggccaatggcacgtcgaggttgatggtgtcgaggtgctcggtttcagcaccgaccaacgcgccgctctggatcgctgcaatcacgccgcgagtggtcgggatgttgaagcgcttaccgacgccgtagccgccgccggtccagccggtgttgaccaggtagaccttggagccgaagccacggatacgcttgatcagcagttcagcgtattcgccagccgggcgcgggaagaacggtgcgccgaagcaggtggagaaggtcgacttgatgccgccaccggaacccatttcggtcgagcccaccagtgcggtgtagccggacaggaagtggtaggccgcctgttcttcgctgaggatcgacaccggtggcagtacgccggtcaggtcgcaggtcaggaagatcaccgcgtttggctcgccgcccaggttcttctcggaacgcttggcaacgtgctccagcgggtaggcggcgcggctgttctgggtcaggctgacgttggtgtagtcggcgtgcttggcgtcgtcgatcaccacgttttccagcacggcgccgtgcttgatggctttccagatgaccggctcgttcttctcggacaggtcgatgcacttggcatagcaaccaccttcgatgttgaacaccacgccttcgccccagccgtgttcgtcgtcaccgatcaggtaacggctttcgtcggcggacagggtggtcttgccggtgcccgacagaccgaagaacagggtcacgtcgcctgcttcgccaatgttggcggcgcagtgcatcggcagtacgtcggaagccggcagcaggaagttctgcaccgagaacatggcttttttcatttcaccggcgtagcgcatgccggcgatcaggacttttttctgggcgaaattgaggatcacgcaaccgtcggagttggtgccgtcacgctctggcacgcattcgaagttggccacgttgagcacttgccactcttcacgaccggccgggttgtactgggccgggttgatgaacaggcaccgaccgaacaggttctgccaggccgtctgggtggtcattttcacagccaggtagtggtcttcggcagcccctacgtgaacgtgggaaacgaaatgctcttgcgcgttgttgaatgcctcgacgcgagcccacagcgcatcgaacttgtcggccgggaacttgcggttgatcgggccccaggcgatggaagcctgggtggaaggctcttcaacgatgaaacggtcgaccggcgaacggccagtacggtgaccggtttcgacgaccagcgcgccagtatcggcgagcacgccttcaccacgctgcagggcttctttaaccagatcgtcaacactcagatcggtgtatacggcgttgttggcttgcgtcatgaggttccccgtcggcctatggccgagtgctccaaacgttttgtagtagaaagttgcgcactactaccgcgaaaaaagtgggccggattatgccagaaaagcccaaaaagagtagggccctcccgtcagaactgcgctaatccggcgtttgtcaggtgatttacctgtgcttaaacgttttagtggcgggtgtcggaaggcgtgtcgatgcctgcgccggcgaacaattgcgctacatcggccgcatcgaacaggtagcgctcgttgcagaactggcagtcgatctcgatatggccgccgtgctcaaccaccaggttttgcgcatcttccaggcccaggctgaccagcgcattggccgaacgctcacgcgagcaactgcaattgaagcgcaggccctgtgcgtcaaacagtcgcacggcctcttcgtggtacaggcggtgcaggatggtttcgttatccaggcccagttgctcttcagcggtgagggtgccggccagggcggtcagcttgcgccagctgtcggtgcgctcatcctcgtccttgatgcggtcgggcggcagttgctgcaacagcatgccgcgggcgcgcttgccatcggcgttaagccagaacttggtgcccacctgctgggacatcacgaaatagttggtgaagcagtccgacagggtttcgccatccagatcgacaatgccctggtagcgctggccttcggtcggatcgacggtaattgccagcacgccgttggccatcaggtcggacaaggtggcatccggcgcaatctggtcggcttcataacgggccaagccacggatttcacgctcgctggagcattcgatcatcagcatcggcaccgggccttcggagcgcgcctgcagaatcagcaaaccatcgaacttcatggtgcccaccagcaacgctgccgctgccatcagttcaccgagcagttgcgcgaccggctccggataggggtgcttggcgaggacttcggcatagctgcgctccagcgagaccagctcgccgcgggcgtcgctctcgtcgaagatgaagcgttgggtgaagtcggtatccggtagatcagtcataggtctgggtatctgaattgatgacaaattgattacaaggtttatagaattaaacgctttagcaccgttttggtgcagttttctgaagccgtgggggacagtttatgaacaatccgggtttgttccaagccaagtggaacctcgggcgatgggccgtttgcaatctactcgctgtcgggttgctgtgtttttggctgtggcccacgggccagatgctgtgtgtgatgttcgacgagtggctgtttcacctgctcaacgacccgctggcgagcaactccgcatggctgcacgtgtgggctgtagcgagtttgcgaccgttcgatgcggtggtcggggtgattctgctgacgctgttgattcgcggcgattgggtgttcaaggcggtgcaggtgcgccaggctttgttaggttttgtcggcattctgttgctgttgctgtttatccgcatgctgttttccaaactcgctgcgcacatgggctggcaacaccatagcccgtccatggtgatcagcggggcgatccagatgagtgactacttcccaggcctggagaagacctgggagttgaaggaccgttcgagccagagcttccccggggaccacgcctcggtgctgctgatttgggggatgttcatgaccgtgttcgccaagcgcgcgggccaggtgctggtgatctggggcctggcgctgctgttcatgatgccgcgcctggtggcgggggcgcattgggggcaggacgattacatcggcggtgtgttgctggcgctgttggcgctgggctggggatactacacaccgtttgcggcgacggtatcgagtgggttgttgcgggtgacggcgccggtgtttgggctggctgctcgtttacccatagtggggcgaatgagcgttgtcaggcctgcgcaataatttgtagtgagcgagcttgctcgcgctgggctgcggagcggctccaaaaaacgggagcgctgcgcactccagcgcggggcaagcccgctcaccacagcaagcccgatcgccacaaaggcccgttcgattgaggctagtcatcgttgccactgccgcgaaacttgaacaggtcgcggcgttgtttcttgctcggtttgccatcggtggtcatgcccgtggcgccggccttgcgcatcgccgccgcgttttcacgcttggcgatgctggcttcggtttcggcgtataacgcttgcgcttcgggtgcgccacgccgaacgatggaaagcgcctgaaccacgaccgtcttttcatcaaaccctgcacgaatctgaaactcatcaccgacacgtggctctttgcccggcttgcagcgctcgccacgatgatgcaccttgccgctctcgatggcggccttggccagggcacgggttttatagaaacgcgccgcccacagccacttgtccagacggaccttttcttcctcttcctgcttttgagccacttgaattcctcgctctgaaaaatgtcgcaactttaccgttgaaacccttcgacgcataaaccccaaggctcacctaagatacgccaggtagcaccctgttttcgcgaggtatgctgtgaccgaatttcccctttcactcacctcgcccaaccagcgctgtgtgggttgccagcaaagcgagctcctcgggttcgattttgcgttcgcttaccagcctatcgtagacctgcgggaccattcgatctttgcccacgaagccctggtgcgtggcacacaaggcgaaggggcgctgtcggtgctggaccaagtcaacgaaagcaaccgctaccgcttcgaccaacgctgccgaacccaggcgatcgccggtgcggcgaccttgggcatgcaaacgcacctttcgatcaacttcatgcccaatgccgtgtaccgcccggaactgtgcatccgtagcaccctggaggcggctcgcgcacataattttccgttgaaccggctgattttcgaaaccctggaaagcgagcatgtagataactatcgccatttgacgaatattctgcgtgaataccgcgaattcggcttcaagaccgccatcgacgatttcggcgcgggctattcggggctgaacctgctggctgatttccaacctgacctgatcaaactcgacatggcgctgatccgcgatgttgatcaggatcgtgttcgtcaggtcatcgtccaggggattgtcacaatctgtgagcagttgggggttactgtcatcgccgaaggcatcgaaagtgccggcgaacgggactttctctccgactgcggaatatttctgatgcaaggctactggttcgccaagcctgcatttaaagccctggccgaggtatcccctcaggcctgggcgaattgatcggttatccatattgaagacatttgaccatttgaccgttgtgggtctgcgtgagtgggtggcacttcccgatctgggagtggcaggcctgcgcgcgaagatcgacaccggtgccagcacctcaagtctgcacgccaccgacattgagccgtttgagcgcgacggcgagcagtgggtgcgttttaccgcgcacttgggcagcgtcgtgcaattgcgtcaccgccgctgcgaagcgcccctggtgacgatgaaaaccatcaagagctccaatggccatgcgcaggtgcgctatgtcatcagcaccacgttggcgctgggtgatcgggtatggcgggtggaatttaccctggcctgccgcaaagccatgcgttaccgcctgttgctgggctccaaagccttgattgacggccaattggtggtcaatcccggtatcaagtacgttcaagacaagccggtgttcccggtctctaccctatctgtcccaggtgctgcatgaagattgctgtgctgtcgcgaaacccgcgtctgtattccacccgccgcctggttgaggccggcaccgaacgtggccacgaaatggtggtgatcgacacgttgcgtgcctatatgaacatcgccagccacaagccgcagatccactaccggggcaagccgctggaggggtttgatgccgtcatcccgcgtattggcgcttcggtgacgttttatggctgcgcggtgttacgccagtttgaaatgatgggggtgtttcccctcaacgaatcggtagccattgcccgctcgcgggataagctgcgctccctgcagctgctgtcgcgccgaggtatcggcctaccggtgactggcttcgcccactcccccgacgacatccctgacctgatcgacatggtcaatggcgcgccgctggtgatcaaagtgctggaaggcacccagggtatcggcgtggtgctgtgtgaaaccgcgacggcggccgaatccgtgatcgaggcgttcatgggcctcaagcagaacatcatggtgcaggaatacatcaaggaggctggtggtgcggatatccgctgcttcgtggtgggcgacaaggtgattgcggcgatgaagcgccaagccaagccgggggagttccgctcaaacctgcaccgtggcggtagcgccagcctgatcaagattaccccggaagaacgcatgaccgcactgcgggcggccaaggtcatggggttggccgtggcgggtgtggatatcttgcgctccaaccatgggccactggtgatggaggtgaattcgtcgccgggcttggaaggcattgagaccaccaccgggaaggatgtggcggggatcatcattcagcatctggagaagaatggtgggccgaatatgaccaggaccaagggcaagggctgatcaaccgccacaaaccagtgtgggagcgggcttgctcgcgaaagcggtggatcagtcaaatatgtatcgactgaccccctgcattcgcgggcaagcccgctcccacatttgacctgtgtcggtgcttagaccgcgtcgcgaggcaacatcagcccaagcggcaagcgcacccgcgcctccaggccaccctcttcgcggttgcgcaactcaacattgcccccatgcatcgaggcaatccgccgcacaatcgccaacccaaggccagtgcccttgccaccccgggcacggtcgccacgggtgaaggggttgaagatgccttccaactcatccgggtcgatgcctgccccccggtccatcacgctcagcaccacatagggcgctgcactgtcgccagacacatacgccgccacttccacatcggaaccggcgtggtgcaaggcgttgccaatcaggttgttcaacaggcgcttcatcgacactcgacgcaacgcaaacggctggatcggctccagacgcatgcgcacctgttcgccgttctggttatagggagcgaccacctcacgcaccaggtccgtcaggtcgacttcctccaccacctcatcacggccatcgcggataaacgccaggaactggtcaagaatcgcgtccatgtcctcaatgtcgcggaccatgtcatcggtgagatccgtatggttgcccatcaactccagcgacaggcgcaatcgcgtcaacggtgtgcgcaagtcgtgggacacccccgccagcatcagctcgcgctcgcgcccagcctgttcgacgtcttccgccatctggttgaacgcgccatacacctcggtcatttcgctgggcgtatcgctgactggcaggcgcacactgcgtccctgacccaattggcgggcggcaaacacaagacgcttgagcggctggttgagctgacgcacaaagatccacgccgacgccgttgaaagcagcccgatcgccaggaaccagcccagcacgttccagattttctgcccgcgcagcggatgcggatacaacggcactttcaaccagtcctcgcccaggctcggcgcacgcacccacaatgccggcgatacatgcatgcgcaaccgcacctcggtgtcttcacccagctcggcctgcatctggcgctggtagatctcactgtagggccaatgctgctcgccttccggcacacccgcgcccgccacacgcaccagagtggcggccttggcgattttctcgcgattctcggggtcagcggcccaataggcacgcaacgtcagggctacgccgtgactgtattgtcgatccaccagcacgtcctcgttcatcaacagataaaccagcgtgagtgccttggaaaacagaacgacgatcagcaccagccagagggtgcgggagaagaaactttgggggaaccacaacggggttttcatagaagacagctggataccttgcagaaacgagcggcgctcgcagaattgcagacgccgggcatcccgtcgaccctcatggagtcagacaccgggaggcccgtaactgcaaatcatcggtcaactggttttgttgccatccggcacaaacacataacctacgccccacaccgtctggatataccgtggcttggacgggtccggctcgatcatccgacgcagacgggagatctgcacgtcgatggaacgctccagggcatcccattcccggccacgggccaggttcatcaacttgtcgcgggtcagcggctggcgagcgttcatcaccagggccttgagcacggcgaattcgccggtggtgagcatgtgcacttcatcgccacgcttgagctcacgggtcgccagcgacagttcgtagtcgccaaaggtgacactttcgtcttcgctgcccggtgcgcccggtaccggcggggcctggcgacgcaatacggccttgacccgtgccatcagctcatcagggttgaagggtttggccaggtagtcatcagcgcccagttccaggcccttgatacggctcagctcatcgcccttggcggtgagcatgatgattggaatctggttgttcgcgccgcgcaggcgcttgcaggcggtcaggccgtcttcaccgggcagcatgaggtcgagtacgaccaggttgaacacttcgcgccccagcaggcggtccatctgctcggtattcggcaccgcgcgggcacggtagcccttggagttgaagaaacgctccagcaggctgctcagccccggatcgtcatcaacgatgagaattttttcgccttcagcagtttgtgcagtgctgctcattggatgctcctcttatctcggcgcgcattatggcctagctgccgttatacgcaccgtgtgcattgttagcagatttttcctctaccgccagcgaacccgcgccctacaaccgttggcgcaatcccccccaaggacagaacgctggttataatgcgccgccgccgtgcagggcaacgtcagatcgttaccgtttgctgccgaggcttttttcacccgcttgtcgcgaatttttcgatttcgagggtcaataggctgcctcttgacccaggcagcggcgccagtcgggccgctcaaccagcctcccagggccttgttttccgggcctgcgagctgcttttcagaatttcaggtggttttatggacagcatcaacagccgcatcgccgaggaactcggtgtacgcccacaacaggtcgaagcggccgtcgctctactggatgaaggctccacggtgcccttcatcgcccgttaccgtaaagaagtgaccggcagcctcgacgacacccaactgcgtcacctggaagagcgcctgcgctacctgcgagaactcgacgaacggcgcatcagcatcctcgccagcatcgaggaacagggcaagttgaccccacaactcgagcgcgacatcaagctcgccgacaccaagacccgcctcgaagacctctacctgccgtacaaacagaagcgtcngagcgcctgcgctacctgcgagaactcgacgaacggcgcatcagcatcctcgccagcatcgaggaacagggcaagttgaccccacaactcgagcgcgacatcaagctcgccgacaccaagacccgcctcgaagacctctacctgccgtacaaacagaagcgtcgcaccaagggccagatcgccctggaagccggcctgggcgagctggccgacggtctgttcaacgacccgtcgctggccccggaagttgaagccgcccgcttcattgatgcagaaaaaggcgtcgccgacgtcaaggccgccctcgaaggcgccaagtacatcctcatggagcgctttgccgaagacgccagcctgctcgaaaaactgcgcagctacctgaagcaggaagccatcctcagcgcccgcgtcatcgccggcaaagaggaagaaggcgccaagttccgcgattacttcgaacacgacgagccgctgaaaagcatgccgtcccaccgcgcgctggcgattttccgtggccgcaacgaaggcattctcagctccgcgctgaaggtcggcgacgaattgccaggcaccatgcacccgtgcgagggcatgatcggtcaacaattcggcatccagaatcagaaccgtcctgcggacaagtggctcggcgaagtggtgcgctggacctggaaggtcaagctctacacccacctggaaaccgacctgctcggcgaattgcgcgacggcgccgaaaccgaggcgatcaacgtgttcgcccacaacctgcacgacctgctgctggccgccccggccggcccgcgcgcgaccctgggcctcgacccgggcctgcgtaccggctgcaaggtcgccgtggtcgacgccaccggcaaactgctggaccacgccacggtgtatccgcatgtgccgcacaacaagtgggaccagaccctggcgatcctggccgccctgtgcgccaagcacgcggtggacctgatcgccatcggcaacggcaccgccagccgcgaaaccgacaagctggccgccgaactgatcaaaaaatacccagccatgaagatgaccaaggtcatggtttccgaagccggcgcttcggtgtactcggcgtcggaactggcgtccaaggaattcccggacctcgacgtgtcgatccgtggcgcggtatccatcgcccgtcgactgcaggacccgttggccgagctggtgaaaatcgaccctaaatccatcggtgtcggccagtaccagcacgacgtgtcgcagctgaaactggcgcgcggcctggatgcggtggtggaagactgcgtaaacgccgtgggcgtggacgtgaacactgcctccgtggcactgctggcgcgaatctccggcctcaatgccaccctggcgcagaacatcgtcagtcaccgtgacgaaaacggcgcgttcaaaacccgcgccgcgctgaaaaaagtcgcacgcctgggtgaaaaaaccttcgaacaggccgccggcttcctgcgcgtcatgaatggcgacaacccgcttgatgcgtctgcggtccacccggaagcctacccgctggtgcaacgcatcgctgccgagaccgaccgcgatatccgttcgctgatcggcgacgccgctttcctcaagcgcctggatcccaagaagtacaccgacgaaaccttcggcgtaccgaccatcaccgacatcctgcaagagctggaaaaaccgggccgcgacccacgtcccgagttcaagaccgccgagttccaggacggtgtcgaagacctcaaggacctgcaaccgggcatgatcctcgaaggcgtggtgactaacgtgaccaacttcggcgcctttgtggacatcggcgtgcatcaggacggtttggtgcacatctccgcgctttcggagaaattcatcaaggatccccgcgaagcggtcaaagccggtgacgtggtcaaggtcaaggtcatggaagtcgacatcccgcgcaaacgcgtcggcctgtcgatgcgcatgagcgacaccccaggggagaaaatcgacggtgcccgtggcgcacgcccaggctcggcaccgcgccagtcgcagaatcgctctgaaaacaatgcaccgcgcaaggaaaccgccaccacagcgccaagcaacaacgccatggcttcgctgttcgccaacgccaaacagctgaagaaacgttgatggaaatcccggccggcttgacccagagcgccttcagcgaactgatcggctgccgcctgcaacgccttgaagaaggcgttgccgaggtggccctgaccctggagccgcaactgcgcaaccgcgcgggcaagctccatggtggggcgattttcagcctggtggacattacgatgggactggcctgctccagctcccatggtttcgaccagcagagcgcgaccatcgagtgcaagatcaattacatccgcgccgtgtcggacggtgacgtgctgtgtaccagccgggtgattcatgccggccgccgtacgctggtggtcgaggcggaggtgtatcaggacgaaagacttgtcgcaaaagcacagggcaccttcgctgtcctatagctccccacccccgatttgagttaatttcggcgctgcactaacggcgtcggaattttctcgctgcgctgtagccaaattcatggagtgaagtcggcatattcagagcgggtcaaatcgactcaaaaccaggcgatcacgccagtttcaacttcacccttgtagaccgtcctgcccacccccatattggggcgactgacgcgtgaaggaatccaacttgagcgaacttctcaaccgccgcctggccctgctcggcaagcgcgaacacctctccctgctagagcagtgcttgcacggcatcgagcgcgaatgcctgcgtgtcaccggtgagggtcgactggcgcaaacgccgcaccccgaagccctgggcgctgcgttgacccacgaacagatcaccaccgactactcggaatcgctgctggagttcatcactcctgccctgcccaacccggccgataccctgagcagcctggacaagatccatcgctttgcctacaccaagctcggcagcgaatacctgtggagcccctcgatgccgtgcccgttgccggccgaggaagacatcccgattgcctactacggcacctccaatatcggacagctcaagtacgtgtatcgcaaaggcctggccctgcgttacggcaagaccatgcagtgcatcgccgggatccactacaacttctcgttgcccgaggcgctgtggccgttgctcaaggaaaccgaagggtttgtcggcactgaccgcgactaccagtccaacgcctatatcgcgctgatccgcaatttccgccgctacagctggctgttgatgtacctgttcggtgcttcgccggccctggacgccgggttcctgcgtggtcgttcgcaccagttggaagcgctcgacgccgataccctgtacctgccctacgccaccagcctgcgcatgagtgacctgggttaccagagcaatgcccaggccggcctcacgccgtgctacaacgacctggccagctacaccgacagcctgcgcgaagcggtggcaacgccctacgcgccctacgtcgaaatcggcacgcacaaggatggtgagtgggtacagctcaacaccaacatcctgcagatcgaaaacgagtactactccaacatccgccccaagcgcgtgacctacaccggcgagcggccgatccaggcgctgatggcccgtggcatccagtacatcgaagtacgctgcctggatatcaacccgttcctgcccatgggtatcgacttgcaagagtcgcgcttcctcgacgccttcctgctgttctgcgcactgaacgacagcccgctgttcgccaacaacgagtgcggcaacgccacctccaacttcctcagcgtggtcaaggaaggtcgccgtccgggcctgcaactgcaacgccagggccagccggtggacatgaaggaatgggccgccgagctgctcgaacagattgcgccactggctgccttgctggatgagagccacggcatcaccgagcacagccaggcgctggacgcccagttggccaaggtcaacgattcgtccctgaccccgtcggcccaggtgctggcggcgatggccgagcgtaaagagagctttgcgcaattctccctgcatcagagccagctgcacgccgagcatttccgcaaggagccgctggcggctgaagagcaggcgcgttttgaagaactcgcgcgtgcctcactggcacagcaagccgagctggagcaaaacgaagtgggcgactttgacgtgtttgtcggctcgtaccaagccagcatcctcgccatcagcaactaagtaagctgaaatcggggcaaatgtgggagggggcttgcccccgatggcgtgggtcagctacctatacagtggctgacacgctgctatcgggggcaagccccctcccacatttgacttccacccgattgaaggtcagcgctcacaactcttctcataagctaattcgaaaatgttatttattttcggattcttagatcatttagtctcctcacacgccgaccctcggccgcctgattgaggagcttccccttgaaactgttaacccctttgcgcctgctggccgcattgtccctggccggtgccagcctgtttgcccaggcggcggacgtgaccatcgcttaccagaccaccgtggacccggccaaagtcgcccaagccgatggcgcctatgaaaaagccactaacgcgaagatcaactggcgcaaattcgacaatggcgccgacatcatcgccgccatcgcttcaggtgacgtgcagatcggctacctcggttccagcccgctgaccgccgcgatcacccgcaaagtaccggtggaaaccttcctggtggccacccagatcggcggcgccgaagccctggtggcgcgcaacggttcgggtatcaacagcccgcaggacctggtcggcaagaaagtcgctgtgcccttcgtgtccaccgggcactacagcctgctggccgccctgaagcactggaacatcgacccgtccaaagtgaccatcctcaacctcgcgccaccggccatcatcgccgcctggaagcgtggtgacatcgacgccacctacgtatgggacccagcactgggcgtcgccaaagagaacggcaaggtgctgatcacctccggcgagttggccaagttcggcgcaccaaccttcgatgcctggatcgtgcgcaaggacttcgccgagaagcacccggaaatcgtcaccgcgttcgccaaggtcaccctggatgcctacgccgcctaccgcaaagacccacaagcctggctcgccgataaaagcaacgtcaacaaactggtgaaactctccggtgccaaggccagcgatattccgcttttgctgcaaggcaacgtctacccgctggccgctgaccaggtgagcctgctgggcgcaccgaccaccaaagccgtgaccgacaccgccgcgttcctcaaggaacaaggcaaggtcgacgcggtactgccggactacaccccttacgtcagcgccaaattcatcaccaattgatcgggagttcatcgcgatggccttgctacagctggagcgcatcagcgcacagtacccaggcgccacagaaccggtactgtcagatatttcactcgacctggggccccagcagttgctggtggctctcggcccgtccggcagtggcaagacttcgctgttgaacctgattgccggtttcgtcgaaccttgcgccgggcgcatcaccctcgatggcgtgccggtcaaaggccccagtgctgaacgcggcgtggtgttccaggacgacgccctgctgccttggcaagacgtgctggccaatgtcggcttcggcctggagctggctggcgtgcccaaggcgcaacgcgaagtccgcgcccgggaaatgctcgcgctggtggacctcgccggtttcgacagccgccgtatctggcagctttccggcggccagaagcaacgcgtcgggctggcccgcgccctggcggccgaccctcgtgtgctgctgatggacgagcccttcggcgcccttgatgccttcacccgcgaacagatgcaggaattgctgctgcaggtctggcggcgcacggccaagccggtattcctgattacccacgacatcgaagaagcggtgttcctcgccaccgacctgatcctgttggcgcccaaccccggccagatcgtcgaacgcctgcacttggacttcggccaacgctacgccgccggtgaatcggcgcgggcgatcaagtccgacccacgctttatcgaaacccgcgaacacgtgctgggcaaagtgttctctcaacgccaggtgtccgcatgagcagctacgaacttcccgccacggtgaccaaaccggtggcgcacgcagtggtcccggtacgccgcagcctgagcacgcgctggatcagcctgctgaccctggtcgcgttgctagccctctggtgggccgtgacggccagcggcttgatcgagccgctgttcctgccaccgccgtccgccgtgctgcaaaagggctggctgctggcgaccagcggctatatggattccaccttgtggcagcacctgggcgcgagcctcagccgtatcggcctgggcctgggctttgccgtgctgaccgccgtgccggtggggatcgccatcggttccaaccgaatcgcccgtggcatcctcgacccgctgatcgagttttaccggccgatcccgccgctggcctacctgccgctgatcgtgatctggtgcggcatcggcgagctgtccaaggtgctgctgatctacctggcgatttttgcgccgattgccatcgccaccgccaccggcgtgcgcaccgtcgacccggccaaactgcgggcggcgcagtcgttgggcgccacccgtgcccagttgattcggcatgtgatcctgccgagcgcactgcccgacatcctcaccggcgtgcgcatcgggctgggtgtgggttggtcgacattggtcgccgcagaattgatcgcggccaccagcggcctgggcttcatggtgcagtcggcggcgcagttcctggtcaccgatgtggtggtgctggggattctagtgatcgccctgatcgccttcgccatggaaatgggcctgcgtgccctgcagcgtaaactggtgccgtggcatggccaggcacattgagtgagaacagcatgagcagcctgaccgttacccccattagcaccgcattgggtgccctgatcagtggcgtcgatatcacccagccgttgaacattgaagagcgcgatgccatcgaacaggcgttgctccagcactcggtgctgttcttccgtgatcaaccaatcaccccccaacagcaagcacggttcgcggcgcatttcggtgacctgcatattcacccgatctaccccaacgtgccggaccagcccgaagtgctgatcctcgacaccgccgtcaccgacgtgcgcgacaacgccgtgtggcacaccgacgtgaccttcctgccgacaccggcgctcggcgtggtgctcagcgccaagctgctgccggcgtttggtggcgatacgctgtgggccagcgggattgcggcctatgaagcgttgtccgcaccgttcaagcgcttgctcgacgggctgacggcgacccatgacttcaccaagtccttcccgctggagcgctttggcaacaccgccgaagacctggcacgctgggaagaaacccgcaggaagaacccgccgttatcgcacccggtggtgcgtacgcatccggtaagtgggcgcgagtcgctgttcgtgagtgatggatttaccaccaagatcaacgagcttgaaccggcggagagcgaggcgatcttgaagctcttgttcgcccacgcgacacgcccggagttcaccattcgctggcgctggcaggaaaacgatgtggcgttctgggataaccgcgtgacgcagcactacgcggtggatgattaccggccgcagcggcgggtgatgcaccgggcgacgattttgggggatgtgccgttctaggcccacacgatctcagcaacactgaaaatcaaagtgtgggagggggcttgcccccgatagcagattgtcggccaactaatcagtgattgacccacccccatcgggggcaagccccctcccacaatggccaagtaatgaccagttattcagcagtggatggcttttcccacaagttgatcccgccttcctgcgcaaaccgatcaatctccgccagttcttccgcgctgaagctcaagttcttcaacgcaccaacgttctcgataatctgctccggccggctcgcaccgatcagcgcactggtcacccgtgggtcacgcaacgtccaggccaaggccagttgcgcgaggctctggccacgccgctgggcgatttcattcagcgcacgcacgtgggcgatgttggcttcggacaagtgcttggcctgcaacgaaccaccacccggacggttgacccgcgcatccgccggtacgccgttgaggtacttgtcggtcagcaacccctgggccagcggcgtgaaggcaatcaccccggcaccgagttcttcggtggtgtccagtaggtctttttccacccagcggttgagcaggttgtaggccggctgatggatcaacagcggcactttccactctttgagcagggcggcgatttcgcgggtttttacccccgagtaggacgagataccgatatacaacgccttaccttgttgcactgcagtagcgagtgcactggcggtttcttccaggggggtgtcggcgtcaaaacggtgggagtagaagatatccacatagtcgacacccaggcgttgcaggctctggtcgaggctggccagcacgtacttgcgtgagccgccgccctggccgtatggaccgggccacatatcccagccggctttgctggagatgatcagttcatcgcggtagtgcttgaagtcttcgcgcagcaaacggccgaagttgatctcggcgctgccgtagggcgggccgtagttgttggccaggtcgaagtggttgatgcccaggtcgaacgcggtgcgcagcagggcgcgctgggtgtcgatcggggtgctgtcgccaaagttgtgccacagccccagggacagtgcgggcagcaccagtccactgcggcctacgcggcgatacggaatagattcatagcggttttcggcagcaatgtaagtcatcgaatcctctcttgaacttgggacaaataaggcccgggaataacgctattcccaggccttttaagcagctgaatcgcttaagtctgccgttccgttctacagcaattgcctaccagaggggaacgacataactcacatagaagcggttttcatcctgcacggtggcaccggtgatatccgggctggcgtgcgcatttttccaggtcacgcccaggcctttaagggtgccggtcggtacttggtaagccacggcaatgttgcgctcccactcgctggtggtgccctgcacggtgcggatgtcatcaccgtgggcgtaggccgccgagaacgtcaggcccgtgaggcccagcttaccgaagtcatacttgtactgcgcaagccaagtacgctcaccggcgtgttgaaatttattcaactgcatattggtcagcgccggggtgtcggcgcctgagcctgggccttggcggttgtcaccgctgttcaggccggaatccaggtacggaaagtcgctgtcgccgctgtttttctggatgcccaggccaacggtatgcccgtccaggctgtagctctcaagcaggctggcggtggtctggttgatgcgacccttgccagtgccgtcaccgtagaggccggccgccgcgaagtccttgtcgccatcggcgttgccgcccacgcccaggctgcggaacacccgcacatcggtgtcgatagcgcccaccgacaaggcatcatggcgcttggcgccaaggaagaactgctggtagtaatcctcaaggttggagtaccacaggctgaccgtggtgttctggatgccggtgtagtccgcaccgccgaacaggaaacgatcgctctctttggtgccaccggcggtaatcatgccctggtcgccggtttcgttgcggatcttggtcttgaagatatcgccaccggtgaaggtgaaatcactgaggtccttggacaccagttgcacaccggtattggtctgctggtacaggcgcccgtcggtgttggccagcaccgggttgttgccgtagagcgtacccaggcgcaactcgtccttggcgaaacgcatcttgaacgtcgggctcaacacgccgaactggtcggcggacttgccgttgtccagcgggaacatgctgccggggtagcggccctggtgatccttgtcgttgagatcgccaccggagtctagcttcaacccgtagaacgcctgcaggtccaggccaaaccccaccgggccttcggtgtagccggacttgaagttgaactcaaacccctggccccaatcgcgaatgctgtgggccttggcgttgctgttcaccacgtcacgcccctgctggttgaggtagcggttgagcagggtcacatcggcgtggctgtcatcgataaaatcggcatgggcggacagcataaagctcgccatggcggcacccaccatagggcttatcaacgtcttcattggtaccggtctccgtcactgttctgaaatgaaagcgtcaaacgcttcacacaattacgcagtggccagatgacagttgcgcgtcaaaacaggcgggcgacggatgaaattaaatttaagaaaacccgaaaattcagggccttgcacatacttttgtgggagggggcttgcccccgattgcggtatgccagccagctcatcggatactgacactccgctatcgggggcaagccccctcccacataaagcttctctgacaggtctgcgttgagcgtcaacgcaccaagtgcaggaactgcaagtgtcgctcgtattggtcgaggatgtcgttgatgatctgctccttggtatagccgaccaggtcatagtcctgactgccctcggccaagtgcacttccgcccggtagtagcgacggttgttgatctctttggagcccatgccaccacgggcaaacgacggcgtgaagtagccgcgcatctgcacttgatagacgaagggatgttgctcgccatggccgatttccaggctgacgctgtcgttggacgggtcgggctgggtgaccacactcaggcccttctcgacgaacaccgccgtcacctcttcaatcgccgggcgcacggttgattccaggaagcgatacacctcatcccgcgacgggaaatgcaccgcctggctcaaccgctgacgccagccgccccggcctttgcgcgctgccgaaaccggcgccagcgagtgcaactgggcgatctgcttctgcgattcgaggtagaacgccttgtgcagcccccacatcatcagcagcaggatcatcgagaacggcagcgaggtcagcaccaccgctgacttgagcgagtcgatgctgccggcgaacagcaaggcactggtgaccagcgcggtcatcgcgccccagaacacccgcagccatttcggcccgtcttcatcggcgttgccgcccttggacgagagggtcgacagcaccacggtgccggagtcggccgaggtgacgaagaacacgaagctgataaacaccgtgaccgcgataacggtcttgctccacgggtaggtttccagcagcaggtagaggctcatcgacgggtcatcgatggccgattggccgagtgcggccatgccgtggttgagcacctggtcgatggcgctgttgccgaagatcgacatccacgccagggtgaaacccagcgggatcagcaacacgccgaacacgaattcgcggatggtacggccacgggaaatacgcgcgatgaacaggcccacgaacggcgaccatgcaatccaccaggcccagtagaacacggtccagccgcccagccagtcgctgggtttgtcgtaggcatacacgtcgaaactcttggtcggcaaggctcccaggtagtcaccgatgttctggatcagggtgttgagcaaatgctgggtggggccggcgaacaacacgaacagcagcagcgcacaggccagcagcatgttgatgtcggacatcacccgcacgcccttgtcgacgccggccacggcgaccaggatcgcagcgcccatcatcagggtgatgaggccaacctgaatccactgggtatgggcaatgccgaacaggtaatccagccctgagttaaggtgcagcaccccaaaacccatgtccgcgcccaggccgaacaccgtggcgatgatgccgaagccatccaccgcgtaaccgatggggccattgatgcgtttgccgatcagcgggtacaacgccgagcgcaacgccagcggcaggttatgccggtaggcgaagtacgccagggccatgccgacaaaggcgaacacgccccagccatgcaggccccagtgcaaaaacagaatctgcatggcctggcgtgcggcgtcggcgttcatcggcgcgccttgcggcggttgcaccaagtgcgtcagcggctcggagacgcagaagaagaacagcgtgatgctgatcccggcggcgaacagcatgccggcccaggacaggtaactgaattcgggctcgtcgtggtcggcaccgagttttatcttgccgtagcccgatagcgcggtgaccaccacgaagaccagatacagggtcatcgccagcatgtagtaccagccgaccgtgttggccgcccagttttgcgccgccagcagccaggcaccggcctgttgcgggatagcgatgacggtgatgccgaacagcaggataaacgtcgcggcaaagtagaagaccggcgcattcatgcgcaccaggccgctggatggggtggacgatgcactcatgaacgatgcaccccgagggtgagggatgtggctgtcaataacggactcagcaaaggtaagcctcctgttgtgagcgggcagcgaaccaccgggtttaacttgaacgaacattcaagttaaacatggataggcggtctgggactaatcgcagggctgagtggtaggtgattcctacactagctcaaggattggtatgacgggcgagaagaggaaatcgttcagcagtctggaggtgaaatgcacacaaaatgtgggagggggcttgccccctcccacattcggtaagcatgctgcttacttctgcgcaccatcttcatgctgcaaattcgcctgggtgatattcgctcccgccggcacgctgcgggtcagccatacgttacccccaatggtcgagcccttgccgatggtgatgcgccccaggatcgtcgccccggcgtagatcaccacatcgtcctcgacaatcgggtgacgcggatggcccttctgcaactgcccgtcctcgtccgccgggaagcgcttggcgcccagggtcacggcctggtagatgcgcacgcgctcgccgatgatcgcggtttcgccgatgaccacaccggtcccatggtcgataaagaaactcgggccgatctgcgcgccggggtggatgtcgatcccggtggccgagtgcgcgatctcggcactgatgcgcgccaacaacggcagaccggcgcggtacaggtggtgggccaggcgatggtgaatcaccgccaggatgccggggtagcacagcagcacttcatccacgctacgcgccgccgggtcgccgtggtaggcggccagcacgtcggtgtccaacaggctgcgcagggacggcaaggccagggcgaaatcctggatcaagcggatggcgtgggcgttaacggcgctgtcgtcctcgccgctctggcgcgcggcgtagcgcagttccaggcgcgcctggccgagcagggcattgagcgccacatccagggtgtggccgacgtagaaatcttcgctttcttcacgcaggtccaccggccccaggcgcatcggaaacaacgcaccgcacagcgactccagaatctgcgccaccgcctcgcgagaaggtaactcgcggccaccatgctcaccgctcaagcgaccattgcgcgtgcgccactggtcccgggcgccgcgcaactggctgacgatggtctgtaattgccaatgactggaacgctcactcacggttttcactcctgacgtaatggcgctcactttacggtatgcaccctggccgcccttaagaaccaatggtgcaatactaagaaccatccggaataagcgattggcggttgcccgatgaaaagtgcctgcctatagtcgccccatcctcatcaaccgtgcgtagccatgatcaaacaacagctcgaccgttttaaccgcctggaactgctgggtggcgccaccgccctggaaaaactcgagcggctgtcggcctggttgggcagagacatctacgtcaagcgcgacgacaccacaccgctggccatgggtggcaacaagctgcgtaaactcgaatacctggccgccgatgccatcgcccaaggcgccgacaccctggtgaccgctggtgcgatccagtccaaccacgtgcgccagaccgccgcgctggccgccaagctcggcctgggctgcgtcgcgctgctggagaaccccaccggcaccgatgaccccaactacctgggcaacggcaaccgcctgctgctggacctgttcgacgccaaggtggagctggtagagaacctcgacaacgtcgacgaccagctcaacgccctcgccgaccgcctgcgcagcaacggcaagcagccgtacctggtgcctatcggcggctccaacgccctcggtgcgttgggctatgtgcgcgccggcctggagctggccgcgcagatcgaagacagcggcatcgagtttgccgccgtggtgctggcgtccggcagcgcgggtacccacagcggcctggccctggcgttgagtgaagtgctgccgcagttgcccgtgatcggtatcaccgtatcgcgcaccgaagaagcccagttcccgaaagtgcagggcctggccgaacgcaccgccgaattgctgggtgtggatatgcccgaggccttcaaggtgatcctgtgggacgaatatttcggcccgcactatggcgaaccgaacgccggcaccctgtctgcggtcaagttactggcgagccaggaaggcctgctgctggacccggtctacactggcaaggccatggccggcttgctggacggtatcgggcgccagcgcttcgaggatggcccgatcattttcctgcataccggcggggcgccggcgttgtttgcctacaacagtgccttcaactgaataaacgcggactaaatgtgggagggggcttgcccccgatgacagagtatcagtcatgacttctgtggctgatacaccgctatcgggggcaagcccccctcccacattagaatctcttgatattcaatattggaatatcagattttatttatattattttcaagtcttaaaaaccggctttatagtcgcgccgtaggcgaagacgcgctacgcgctttaaggcaggatacgactactgcgtcacctgcttcgcacaccataaaaacacaggggctcttcatgactatttctgtattccgtcgcacgttgctggttggcactttgggcctggcactcggggctggcctgatcggccaagcagtcgcgggtgatcagctggacaacatcaagaaagccggcgagatcaagatcggcctggaaggtacctacccgccgttcagcttcgtcgatgaaagcggcaagctcagcggtttcgaagtggagctgtccgaagcactggctaaagagctgggcgtgaaggtcaagctgcaagcgactccgtgggacggcatcctcgccgccctggaatccaagcgcctggacgccgtggtcaaccaggtgaccatctccgatgagcgtaaaaagaaatacgacttctccaagccttacaccgtctccggtatccaggcgctggtcctgaagaaaaacgtcgacaccatcaagaccgccgacgacctggccggcaagaaagtcggtgtgggcctgggcaccaactacgaacaatggctcaaggacaatcaacccaaagccatcatcaagacctacaacgacgacccgaccaagttccaggacctgcgcatcggccgtatcgacgccatcctgatcgaccgcctggccgccctggaatacgccaagaaagccccggacaccgctgctgccggcgacgccttctcccgccaggaagccggtatcgccctgcgcaagggtgagccagaactgctggatgcagtgaacaaggcgctcgacaaactgcgcgccgacggcaccttgaagaagctgtccgagaagtacttcaacgctgacgtcactcaataatggaagcaggtttccaactcgcgctggactccgcgccctttctgctcaagggcgcgtattacacggtgatcctcagcctcggcgggatgtttttcggcttgctgctgggcttcggcctggccttgatgcgcctgtcgcgcttcaagctggtgagctggctcgcccgagtctatgtgtcgttctttcgcggcacgcccttgctggtacagctgttcttgatctactacggcttgccgcaagtgggcatcgagctggatccgatcccggccgccatgatcggcttctcgctcaacatggccgcctacgcctgtgaaatcctgcgcgccgccatcggttccatcgagcgcggccaatgggaagccgccgccagtatcggcatgacccgcgcgcagaccctgcgccgggccatcctgccgcaggcgatgcgcacggccttgccgccgctgggcaacagcttcatttcgctggtcaaggacacggcgctggccgccactatccaggtgcccgagctgttccgccaggcgcaactggtgtcggcacggaccttcgaaatcttcaccatgtatctctccgctgcgctgatctactggattttggcgagcatcctggcgcatttgcaaaaccgcctggaagaccgggtcaaccggcatgacctggagtcctgaagcatgatcgtggttgaaaaactgaccaaacaattcaagggtcaggtggtgctcaacggcatcgacctggaggtcaaggaaggcgaagtcatcgccatcatcggccccagcggttccggcaagaccaccttcctgcgctgcctgaacttcctcgaacaacccaccagcggccgcatcaaggtgggtgacatcgagatcgacaccagcaagccgatcaaccagcaacaaagcctggtgcggcgcctgcgccagcacgtgggttttgtgttccagaacttcaacctgttcccccaccgcaccgcgctggaaaacgtcatcgaaggccccaccgtggtcaagaagatgccacgcgaagaggctatcgctttggggcgcaagttgctggccagagtcggcctggcaggcaaggaagacgcctacccacggcgcctgtccggcggccagcagcagcgcgtggcgattgcccgtgcgctggccatggagccggaggtgatcctgttcgacgaacccacctcggcgctggacccggaactggtcggtgaagtgctggcgaccatccgcagcctcgccgaagaaaaccgcaccatggtcatcgtcacccacgagatgagttttgcgcgggatgtggccaaccgggtgatcttcttcgacaagggcctgatcgtcgaacaaggtgaagccaaggcgttgttcgccaaccccagggaagagcgcaccaagcagttcctgagcaaattcctcgcccactgataccctttgtaggagcaagctcgctcctacaagggatcgtcgttcccgcgggtaaaacaccccagcgcacctacctgaatatccccgcctcagtcggaccgttctgaatatctccaaacccgccatttagccctttgccgccattgacggccctcggccaaccctcttatctagcgcccagaggattggatcctatcccggctattcactgaatcgttcttttcggcccaccgcgtgcacccacgccaaagggccggaacgatggctgctggctgcatcaaggagatgacttatgacacgccccctgctcactgccccgacactgccccaggccatcggcaatggcatcaatgccttggccgccacccacttgcaggtcgacatcgctgcgtatcccggcatggatgaaggcgacctgatcgaactgttctggaacaactgcttcgccgcttcacgccgggtcaccgccggcaggattggcgcggtcactcacctgcgagtaccggaaagtttcgtgttcgatggcccggctcgtgtgcattaccaggtcatgcaggtcggtcatgctccggctcgctcagcggtgacccgagtccgcgtcaagaccctctacccgggcggccagccgtcgcccctgtacctcgatgagaaccagaacctcgcccccgtgggcctgcccgacaccatccgccgctacggcgtcaacgccgggcaggggcgacgcggcattcccctgaccatcgagccgtacctgaacatggccagcggcgacgccatcaccttgcgctggggcgatgtgcgcctggacctgcccaaggtccaggcccgggaagtcggccaggccgtgcaggtctgggtgccttcgacggtgattctcgaaggcggtgacgactgccggctggaggtgacgtactgcattctcgatcgtgtcggcaacaattcactctgggcacccgcgcgcaccttgcgcatcgcagcaggagcaccgtcccgcccggcggggagcgcgctgatttaccagccacgaactctgggctctccctgcgaacctgggtgacagaccttctatgcatattcccaaaagttagtttatttaaatatttaacacgcttagggtatatgcaccggaccaccggacatctctgatttttctgtttttatttcattgaatgcgaggtcggtatggtcagaattaccccggtgcgcaacgccagggcattacgtgcagccaaggagcggcgctgatgtctaacttggctctaacacccccccagaatgatctggacgtcgcccccctgctgttgccggccaccgtgctgcgcaacgatgcagaggcgctgaaggctgcccatgagttggcccaggcggcgcgcctgcaagccgccaggcgcgaccagcaacgcaaactgccgtgggcgcagatcgagcagttcacccgcagtgggctcggcagtatttccattccccgtgagtacggcggcccgcaggtgtctttcgtgaccctggccgaggtgttcgcaatcatcagcgcggccgacccggcactcgggcagatcccgcagaaccacttcggcatcctgcacctgttgcagggcgccgccaccgagcgccagaaaaaacagctgttccagagcgtgctcgacggctggcgcatcggcaatggcggcccggaacgcggcaccaaaaacactctggagctcaaggcgcgcatcaccgccaagggtgacggttacgtaatcagcggccaaaagttctattccaccggcgcactgtttgcccattgggtggcggtcaaggcgttgaacgatgacggcaagcaggtcatggcatttgtgcgccgtggtaccgaagggctgcgcatcgttgacgattggtccggcttcggccagcgcaccaccgctagcggcacggtgctgctggatcaggtgccggtggaggccgagctggtggtagaaaactggcgcatcggcgagacaccaaatatccagggcgccgtctcgcaagtgatccaggcggccatcgacgccggtatcgcccgtggtgcgctggatgacaccatcgccttcgtacgcgaacgctcgcgcccctggatcgacgccaaggtcgaacgcgccagtgacgacctgtatgtgatcgccgacatcggcaagctcaagatcgaactgcacgccgccgaagccctgctgcgcaaggcgggacaagtgctggaccaggtcagcgccgcaccgatcaccgcgcaatccgccgcgcgtgcctccatcgccgtggccgaggccaaggtgctgaccaccgaagtgtcgctgctggtcagcgagaaactcttcgaactggccggcagccgcgccaccctcgccgaattcaacctcgaccgccactggcgcaatgcccgggtgcacaccctgcacgacccggtgcgctggaagtatcacgccgtcggcgcctatcgattgaacggcaccttgccagctcgccattcctggatctgaccgaccagacctctggagaacacctatgactttctctgcaaacgtcgcggtcatcaccagcgacgaacaagcccttgttgtcgccagtgatctggccgaagactttcgccgcgacagcgcccagcgcgatcgcgaacgccgcctgccgctgcccgaactggacgtgttttcacgctccggcctgtggggcatcagcgtacccaaggagtacggtggcgcgggcgtgtccaacgtcaccctggccaaggtgattgccttgatagcccaggccgatgcgtccctggggcagatcccgcagaaccatttctacgccctggaagtgctgcgcgtaaacggcagcccggcgcagcaaaaacgcctgtacgccgaggtacttgccggccagcgcttcggcaacgccctggcggaactgggcaccaagacggcccatgaccgcgtcactaaaatcacccgcgacggtgacggttttcgcatcagcggccgcaagttctattccaccggcgcgatctacgcccagcgcattcccacctcggtggtggatgaacacggcgtacagcaactggcctttgtgccgcgtgacagtgaaggcctgagcgtgatcgacgactggagcggcttcggccagcgcaccaccggcagcggttcggtggtgttcgacaatgtgtgggtagccgcgcaggacgtgatcccgttccagagcgccttcgaacgcccgaccaccgtcggcccgctggcgcagatccttcatgccgccatcgacaccggtatcgcccgcgcggcctttgaagatgcgctgcactttgtgcgcaccaagacccgcccgtggatcgacgccggcaacgacaaggccaccgaagacccactgaccctgaaaagcttcggccacctgagcatccgcctgcacgccgccgaggcgctgctggagcgctcaggcgaatacctggaccgcgcccaggccgacagcaacaccgagaccgtcgctgccgcctcgattgcggtcgcggaagtgcgcgccttgagcaccgaaatttccctggccgccggcagcaccctgttcgaactggccggcagccaggcgaccctggctgaacatggcttggaccgtcactggcgcaacgcccgcgtgcacaccctgcacgacccggtgcgctggaagtaccacgcggtgggtaattactacctgaacgatgaaaacccgccactgcgggggaccatttgatggcgaagaaaaaaatcctgctcaatgccttcaacatgaactgcatcgggcatatcaaccacggcctgtggacgcatccacgggacacttcgacccagtacaagacgatcgagtactggaccgagctggcgcaaaccctcgaacgcgggctgttcgacggtttgttcatcgccgatatcgtcggtgtgtacgacgtgtaccagaactcgattgatgtgccgctcaaagagtcgatccagctgccggtgaatgatccgttgctgttggtctcagccatggctgctgtcaccagaaacctcggcttcggcctcaccgccaacctcacctacgagccgccgtacctgttcgcccgccgcatgtccacgctggaccacctgagccgtggccgtgtgggctggaacatcgtcaccggctacctcgacagcgccgccaaggccatgggcctcactgaacaagtcgagcatgaccgccgctacgaccaggccgatgaatacctggaggtgctctacaaactctgggaaggcagctgggaagacggcgcggtgctcaacgatcccaaggcgcgggtgtacgcgcagccgggcaaggtgcacaaagtcgcgcaccagggcgagttctaccaggtggagggttatcacctgtgcgaaccctcgccgcagcgtacaccggtgctgttccaggccggcagttcggagcgcggtttgctgttcgccgggcggcatgccgagtgcgtgttcatcagcgggcagaacaaggcggcgaccaaggtccaggtggacaaggtgcgcgccagcgcggtcgcggccgggcgcaacccggatgacatcaaggtgttcatgggcctcaacgtgatcgtgggcgccaccgaagaacttgcctgggaaaagcacgcggaatacttgagctacgccagcgcggaggctggcgtggcgcatttttccgcatccaccgctatcgactttgcccaatacgcactggacgaaccgatccaatacgtgaagagcaacgcgatccagtcagccaccaagaacctgcagaacaacgactggacccgacgcaaattgctggagcagcacgccctgggcgggcgctacatcaccctggtcggctcgcccggacaggtcgccgatgagctggaatcctggatcggcgaaaccggcctggatggcttcaacctcacgcgcatcgttacgccggaaagctacgtggacttcattgacctggtggtgccggagttgcaaaagcgcgggtcgtacaaaactgaatacgaacagggaacgctgcgggaaaaagtcttccagggcagcgcccgcctacccgaacaacacaccggttccacctaccgacaaactgcttctctgactggaaatacccaatgaaaaagacactgctcacccatccagtcaaagcactggccctggcgttcggactgttcagctcggcggtattcgccgccgatgcaccgctgaaaatcggcaccaccgccgcctttgcgattcctctggaagccgccgtggccgaagccggcaagcaaggcctgaaagtcgagctggtggagttcaccgactggatcgcacccaacgtcagcctggctgctggcgatatcgacgtgaactacttccagcacatcccgttcctggaaaacgccaaggccgccgccggttttgacctggtgccttatgcgccgggcatcatcaacaacgtcgggctgtactcaaagaagtacaagagcatcaacgacctgccccagggcgccagcgtggcaattgccaacgacccgatcaacagcggtcggggcctgcaactgctggccaaggcggggctgatcacgctcaagccgggcgtgggctacaaggccaccgaagaggacatcgtttccaacccgaagaagatcaagatcctgcaggtcgaagcggtgcaactggtgcgcgcctatgacgatgccgacctggtgcagggctacccggcgtatatccgcctgtccaagaccttcgatgccgagtcggcgctgctgttcgacggcctcgaccatccggagtacgtgatccagttcgtgatccaacccaaaagcaagaccgacccacgggtgatcaagtttgtggatatctaccagcattcgccggtggtgcgtgccgccttggataagtccctcggcaagctctaccaagtcggctgggaagataaaaaatgaccgccgcccatgccccactgcgcgacctgggcctgccgcccagggacgccgaacagaccgaactgcaccccgagctcaatcgcgcccatgtgcgttttatcaacttgggcaagacctacgacggcacggtgcatgcgttacaaggcatcgacctggcgatccagcgcggtgaagtgttcggcatcatcggtcgcagcggcgccggcaagtcgtcgctgatccgcaccatcaatcgcctggaacaacccagcagcgggcgggtgctgatcgatcaggtggacatcggcgacttcgacgaagaccgcctggtggccctgcgtcggcgcatcggcatgattttccaacacttcaacctgatgtcggccaagacggtgtggcagaacgtcgagttgccgttgaaagtggcgggcgtaccgaagcagcagcgcgagcaaaaggtgcgtgagctgctggaactggtggggctgcaggacaagcacaagtcttatccggcgcagctttccggcgggcagaaacaacgggtgggcattgcccgctcgctggtgcacgaccccgagatcctgttgtgtgacgaggccacctcggccctcgacccggagacgactcaatcgatcctcggcctgctgcgcgagatcaaccggcgcctgggtttgaccatcgtgctgatcacccacgagatggcggtgatccgcgagatctgcgaccgcgtggtggtgctggaacatgggcgcatcgtcgagcaaggcccggtttggcaggtgttcggcaacccgcaacatgaagtcagccaaaccctgctgacaccgctgcaacacgggctgccggatgaactgcaaagccgcctgcaggccacaccggcgacggccgacgcggcgctggtgctgcgtttgcaattcaccggcggcgacaccgacgaacccgacctggccgccctgttcagcgccctcggcggccgcgtgcgcctgttgcaaggcggcgtggaacgcatccaggggcatgccctggggcaattgctgctggcggtgaatggctcgccccacagcgccgaagaactgcgcaaacgggccgggaattgggcacaacagacggaggtgctgggctatgtggtttgatcgattggtacaaggcgccatcgacaccttgctgatggtcggcgtgtcatcgctgatcgcgctgctggtgggaatcccgctggcggtgttcctggtcaccagcgacaaaggcggcatctaccaggcgccagcgcttaaccgcgtgctgggggcgttcgtcaatctgttccgctcgattccgtttctgatcctgatggtggcgttgatcccgttcactcggctgatcgtcggcaccacctacggcgtgtgggccgcagtcgtaccgctgaccatcgccgccacgccgttctttgcacggattgccgaagtgagcctgcgcgaggtcgaccacggcctgatcgaagctgcccaagccatgggctgccgccgctggcacatcatctggcacgtgctgttgccggaagcgctgccggggatcgtcggcgggttcaccatcacgctggtgaccatgatcaactcatcggccatggccggcgcgattggcgcggggggcttgggggatattgcgtaccgatacgggtatcagcgctttgatacgcagatcatgttgacggtgattgtgctgctggtggcgctggtggcggtgattcagttgggtggggatcggttggcgcgggtccttaacaagaggtgaggtatagtcgggccatcgaagacgcacggtattccccgtcatgacactcaagcccgacgacctcagcaccatcaccgccaccaccctcggccactacaacaaagtggccgacgacttccgtgaaggcacccgcgatcacgatgtgagccagaacatcgatgccttgctgaggcatatccagggtacggcgccgtttaccctgctggatttcggctgtggaccggggcgtgatttgcagaccttcacgcgcatggggcatatcgccgtgggcctggacggctcggagcgctttgcgcagatggcgcgggaggacagtggctgtgaggtgttgcagcaggacttcctcaagctggacctgccggctcaacgctttgacggggtcttcgccaatgcggtgctgtttcatatccccaagcaggaattgccgcgtgtgctcaagcaactgcatggcgcgttgaaagcggggggcgtattgttcagttccaaccctcggggcgagaaccaggaaggctggaatgggccgcggtatgggtcttatcacgacctggcggcgtggcaatcactcctgacgcaagccgggtttgtggagttggagcattactaccggccggcggggttgcccagggcgcagcaaccctggttggcgagtgtgtggcgcaagcggtagattttcgttgcctggtcggacgccatcgggggcaagccccctcccacagtttgatatgtgaatacagtcaacatgtgggagggggcttgcccccgatgacgcctgctgaggcaaccctactccacctgatacaccagcggtttctcacccaccccatatgcagtcacactgcgtccggcatagccctctctcgaggtcgcagcaaaattcgccaccaaccgcgtcccatcggcaaaggtggtttgctgcacctgcctgtccggcgtcagccaacgaaaatccgtcatcgcctgggtcgccaaacgctggtgcagcggccggaaaaaccgatcctgacgcaggatcagcggcaggcgctgcttaacggtcgaggcattcaagtgatacagcggcggcacgttgtagagcagttgcgtcagctcgttttcagcctgcacattgctcagcttcaggctgtcgaacagccagtggtgggtggtgattaccgagccgtggaacaccgcctggtacaacggcaggcgcatgctcggctcaaagtagaccgtgcgaaacggctctttgagcggcaccggcttgaagaacaccgtcggctgctccggcgggtaccaattgcccacgtagtagggcgattgcttgtctttggtcatggcctggtcaccccagccaatcaccggcgtctgcatgccatgggcgaacagaatgccttgggtggtgatggcgttgccgtcttcggagcccgctggcaatttgagcacggtgttgagccagcgcgaggcgtcgatattgccctcggcgttttgcgcctgggtcatccgggcgccgtcgcggtagctgtcgaacaccatgctggtggcataggcatcaaggaaccacgcgttgaagccagccttggcctggatagcctttacgcgggcctccaacagagggcgcacgcagcgcgggtcagtgtagtggccggactgctggaagccggttttcagcttgccatccttcagcacaatcgcgcactcgcggtaggccctgctgcccaggtgagcggtggtccaatccggattttccgtggcggacaacgcagtttcataggaatcgtagggcgccatcaggtaacccgcatcgaccccggcgcggatcgcttcggggtgccacaggccgccctcccagccttcgcccagggtcagcagcaagcgcgaaagacctgagtcacgcagcgactggatcgcccggctgccccaggtttgaggggtatcgctcagcgccccggcaaacgcgacagccaactcgccgcgcagctcaccataacgtgcagcgaggcgcggcatgtcaggctcatctacctgccaactctgcctggccttccggttgatggccgcattcagcccccgcaacagcgccgtctgctcatagcgattcaagggcgtggcctgcgccaggactttcgtcgattccttgtcgagcaagcctttgagctcatggccacgcaggcgcttgagcaacaacggccagtcacgcacatcctccgctgccagcaggtcattgccccacaggtagacatggctggcacccagcagcttctgtgcctcgggcgtctgccgcagcttgtccgacagcggttcataacgcccttgctcgaccagccattggcggtagcgcttggcgccggccaagggatcggcctcccccaggtgcaacagcagggtcatcggcgcagcagggtcgagcgcggtgaattcgtgggccacggacagcgccatccctgcctgccagcgcaggcgattgttgtaggggttggtcagcaaccagttcaaggtgaagcgcccgtggtccaggccccacagcggcaggctgaggtcctgggtggtgttgaggtcaccttgttcctgcaaaaacgttttccacacagcgttgtcggcaggcacgtaatgcccttcggccaatggccacatcagccctttgcccagggcgctggcgggttgccggaggatgggcagctcgccaggctcacgtgcgcgcagggtcaacttgaggtcgcgctgttcaaggctggcgctcacccggaaggcgccgtcatcccactgccaactggcctgttgatcgctctgcacaagctggctgacggcacgggccggcaagccgctggaggcttgcaccgccgcctgcccggtgggcgtcacacggatggcgagagtggccgggtcgagttcgacccgccacagggggttttccaatacggtgctggcaaaagccacgggtgacagcaacagcgtgcaaatcaacagaccgtggcgcagggagtgatgcatgttcagctctgctctggtttgggctcccggatcttgtaccaagctacgtacagcgcaggcaaaaacaaaagtgttaacaacgtcgcgatgatgatcccgccgatcatcgcgtaggccatcggcccccagaacacttcacgggcaatcgggatcatgcccaggctcgccgccgctgccgtaagcaggatcggccggcgccggtgctcggtggcttccaccaccgcatcccacggcgtatagccggccacctcgtactcatgaatctgcgtcaccaggatcaccgagttgcggatgatgatgccgatcaacgccagaatgccaaggatcgccacaaagcccatgggcgtgcccgtggggatcaacgccagcaccacgccaatcagcccgagcggagcgacactcgccaccaggaacatcttctgcacgctgtgcagctggatcatcaggaaggttgccatcaggaacagcatcaacggcaccacgctggcaatcggaccctgcgccttgccgctttcttccacggtgccgccggtggcgaccttgtagcccaccggcaggccggcgctgaatttgtcgatttccggcttgagctgcttgaccaggtccgtcggttggatctcatcgcgcaccgaggccttgatggtgatggtcggtttgcggtcgcgacgccataccagcggctgctccagctcgtagcgcacggtggcgaaggccagcagcggaatcgaggtgccgttgggcgtgacgatctgtaggttctgcagggtttccggcgtaccgcgttcagcgtcttcggcacggccgaccacattgatcaggtagatatcgtcatgcacctgggtcaccgaagatccgctgaccacgctgttcattaactgcgccacgtcttccgacgacagccccagttggcgcgccttgtcctgggcgatgtcgatacgcagcactttgcccggctcgttccagtcgtagatgatctcgcccaggtgagtgttcttgtccagcaaggtcgccagttcgatggcgtgtttgcgcacttggtcggtgtctttgcccgacacgcgatactgaatcggcctgcccaccggcgggcccatttccagcggctgcacgtaactgccgatgccgacgaagtcatcacgcaggcgcttttgcaggcgcgcgatcaactcgccgcgctcttccaggcccttgctcacgatgaccaactgcgcgtagtaggggttttccagttgctggtcgaggggcaggtagaaacggatcgcgccctggccgatataggtgctccagcgggcgatgtccgggtcgtccttgatgatcgcttccaggcggtcgacagccttgcgcgtctcgttgatcgaggcgttttgcggcaggttgaggtcgacaaggatctccgggcggtccgacgagggaaagaactggttctgcacgaactgcatggaaaacaccgacgccacaaacagtgccacggtgatgccaatcgcccaccagcggttgcgcatggcccatagcatgccgccattgaacgcccggccgatccgccccggctctgcgttgtgaggtttaacgttggcactgaggatatgcacgccgatcaccggcgcaaacagcaccgccaccacccacgagaccagcatcgccacggcaatcaccgcgaacagggtgaaggtgtactcgcccgccgagctggcgttgaggccgatcggcacaaaccccgcgaccgtcaccagcgtaccggtgagcatggggaacgccgtcgaggtgtaagcgtaggtcgccgcctgttccttggtctcgcccttttccaggcgcgtgatcatcatctcgacggtgatcatcgcgtcatccaccaacaggccgagggcgataatcagcgcgcccagggacacacgctgcatggtgatgccgctgtattccatgaacacgaacaccagcgccagcaccaacggaatcgagcacgccaccaccagcccggcgcgcatgcccaggctgataaagctcaccaccaatacgatgatcaccgcttcgaacaacgcgctggtaaagccgccgacggcctcttccaccacttccgcctggtcggacaccttgtgcacaccgacgcccaccggcaggtcggcagtgagttcgtccatgcgctcatgcaaggctttgccgaacgactggatattgccgcccttctgcatggcaatcgccagaccgatggccggcttgccgttgaagcggaacattggccgcgccgggtccacataaccccggctgatgtccgcgatatccgccaggcgatagaaccggtcattgagccgcaggttgacgttggccaggtccttctccgaggcgaactgccccgaggtgcgcaccgaaatccgctcaggcccggcctcaatcaccccggccggcgtcactgcgttctgcgattgcaagctctgcaccacctggcgctggtcaatccccagcgccgcgagtttgcgcgtagagaaattcaggtaaatcacttcgtcctgctggccgatcatctcgaccttgcccagccccggcaccgaacggatctcggcgcgcacctgctccacgtagtcacgcaactggcgcatcgacaggccatcgccggtaaacgcgtacaccgagccgaacacatcaccgaactcatcgttgaacgacggcccctgcaaccccggtgggaagctgccgcgaatgtcgtcgatcttcttgtgcaccaggtaccagatatgggggatgtccttggcactggtggtgtccttgaggaacacgaataccgtggactcgcccggccgggtgtagcttttcacgtagtcgagggagtcgagctcttcgagctttttctcgatgcgatcggtgacctgcttgagggtttcttcctgggtcgcgcccggccagcgggtctggatcaccatggtcttgatggtgaaggaagggtcttcctcgcggcccaggttcatgtacgaaaacacgcccatcagcagcgcgacgaacatcaggtaccagacgaaggactgatgcttgagggcccagtcggataagttgaagctccctttcatcgcgggctgtcctcgtcgattttgactttttgcccgggtttcaggctgttcacgccggcggtgacgatgcgctcgccgggtttgacgccgccgttgagcaaggcgctgtcggcatcgcggctgaccacgctgatgtcgcgcggttgcacggtctggctttgggtgtcgagcagccagatgcgggtctggccgtcgacctcctgcaaggcactcaggggcacttcgatgcgcggcgcgatggcagtactcaacgttacgctgatcgccgtgccgaggcggaacgcgggcggcgtttcggccagggtcaggcgtgctcggcgggtgcgcgtggcgctttgggcctggggttcgatctcgcgcacgatggcggtggtgtgcacgctggggtcgagctgtccggcaaccagaaacaccacgtccggtggcaaacgctcggccaggccggcgggcaggtcgatcaccgcttccttgatatccgggcgcgccagggtcaccacttgctggccggcactgaccacctggccggcctcggcattccaggcggtgacgataccggcgtggtcggtgcgcagttcggcgtagttgagctggtctttggcttgattgaccgaggcctgggcctggtcgagggacgcctgggtggtcttcaggtcggtctgagcgatatccaattgggcctgggcgccgacgccacggttgaacagttcctgctggcggcgcgcattggcctgggcgttgatgtattgcgcctgcacgcgggccagatcgccctgggccgagcgcaattggttctgttggtcggtggggtcgaggacggcgagcaaggcgcccttctccacttcggcacctacgtccacggcgcggcgggcaatgcgaccggatacacggaagcctaagttactttcgtagcgggcctggatggtgccggcgaagcggccaaggttttcctggtcttccgacttcacttccatggacagcaccgggcgcaccggctcgggcggcggctcttccttggagcaagccaccagcaacaggctggcggcgagtatccccgtgaggcgcttcatggctgggctcctggctgggcgatctcgagaatcatgccggggtgcagcaattgcccgccggccaccacaactttttcgccgcccttgaggccgtcgccaatgatgactttgccggtgaggtaacgcgccacagtgaccttgtgcagctgcgccttgccgtcgccgtcgatcagccatacggcaggttcgctgaggtctttggtcagcgcggcccacggcaattcgatactggccttggccgggccattggcggtggcgcttaccactgagcccagctccatgcccttgggtaaggcctgcagggcgattttcacctgcacggtgccggtgttggcggccacggcgggggtgacctcacggaccttgcccacagccttgatgctggggttatccagcaggctgacggtgatcggagcatccggcggcggctccaccagcagggattcatagacgttgaacaccgcatcgcgctcgccatcgcgcgccaggctgaaaatcggcacggtggcctgcaccacctggccgacttcggcctggcgcgcggtaatcaccccgggtgcttcggcgatcagcgcggtgtaaccgagttgctcgcgggcgttggccagttgggcctgggcggcagccagggcgctttggctgctgcgcaacgcagcctgggcggaatcgtattcgctgcggctggtgtagcccttgggcaagagtttttcctggcgcacgaaggcggcggcggtctgcttgacccgcgcctgttcggccacgacctgggcctgggcggagtcgacgttggtctgcaagtccttgggatcgagcttggccagcacttgcttggcggtcacgcggtcgcccacgtccaccatgcgctggatgatcttgccgcccacgcgaaaggacaggtcggtttgcacccgggcctggatatcacccgtgagggtcaccgccgcagcaaaatccgccggctgcacggtctgcacgaacacccgcgaatgggccttgggttcagccttatcttcgccacagccgctcaacagcgccagtaggccaaggccgaaaatacaggtggaaatgcgagcgcccatgcaggctccttttgcgtgatgccgacgtgccagtgtgtatgcgactgtgagcttagttcagggttccttatctgcatggaggctcccatactccaatggttcccacgccgactggatgcccatgctcaagaccctcgcggtggccaattaccgctcgatcaataaattggtggtgcccctggaccggctgaacctgatcaccggccccaacggcagcggcaagtccaacctgtaccgcgccctgcgcctgctggcggaaaccgcccagggcggagtgatcaatgcgttggcccgtgagggtgggttggattcgaccttctgggccgggccggaaagtatcagccgacgcatgcgcaacggggaagtgccggtggagcccatcgtgcgccaaggcgtcaaacgcctgcgcctgggctttgccgctgaagatttcagctacgccatctccctggggctgccggaaaagaccttgtcgtatttctccctggacccggaagtaaagaaggaatgcatctgggccggccatatctatcgccccgccagcctgctggtgcagcgctccggccccatggtgcgcgcccgcgagggccgcgcctgggatgtgctggcccagcacacgcccaactaccacagcctgttcgaccaggtcggcagcctgcgcggttcgccggaggtgttgctgctgcgcgaaagcatccgtggctggcgcttttacgatcactttcgcagcgatgtggatgcgccggtacgtcaaccccaactgggcacgcgcacaccagtgctgcatcacgatgggcgcgacctggcggcggcgttgcagacgattcgtgaaatcggcgatcccgaggcattgcagcgcgcagtcagcgacgctttccccggcgcgcgcctgaatatcgagcccttgcagggcgggcgctttgcgattgagttttatcaggaaggtttgctgcggccattgtcggcggcggagctgtcggacggcaccttgcgctacctgctgctgatcgccgcgctgctcacgcctcggccaccgaccatgatggtgctgaacgagccggagaccagcctgcacccggatttgctgccggcgttggcgcgcttgattatccaggcgtcgcggcagtgccaagtgtgggtggtgtcccatgccagccgcttgattgcggcgttgcagcaggacgaggggtgtaattcgattttgctggagaaggtgctgggggaaacccggatcgtcgggcaggggatattggatgcccccgcctggcattggccggaataggcggtggctgctctggcctcatcgggggcaagccccctcccacannnnnnnnnnnnnnnnnnnnnnnnnnnnnnnnnnnnnnnnnntgtgggagggggcttgcccccgatgaggccagaacaatcaatcaacaatcagccctgccacttcccgccttcaacaatcacactttcaggcttggtgtcatcgctcagttctttacgcacatactggtcatacagcttgagcaaaaatttctcctcgcccaacttggccaactcggcattcacccaatcgcgcagttcgatgttgcctttcttcaccgctggcgcaatcggcgcttcatcaccgagtttctcttccagcacgcggtagccgggattctgcttggcccagctgaacagcaccagattgtcctgtgcgtaggcatcgccacggccagccgacagcgcttgcagcgactcggagtttttctcgaacttgagcagtttccagtccgggtggttcttggtcagccagatatcggcggtggtaccggtggtgacgatggtggtgcgggtggccaggtcatccaggctttttaccgcactgtcattcggcaccagggcctgtaccgcgactttcaggttggggttggtgaagtccaccgcttccttgcgctccggggtcacggtcatgttggcgaggatcaggtcgactttgtcactttgcaggaacggaatgcggctggccggctccacggcgacgaattcgactttgttttcatcgcccaacaggtccttggcgaattggcgaccgatgtcggtatcgaagccgacgtagcgccccgcttcgttgacgaagccgaacggtggtttgtcggtgaacacgccgacgatcagcttgtcgcgcgctttgattttttcgatataactgacagcggcaggttttaccggctcttcggcctttttatcgcaaccgaccagcagggcgacggcaaacagtggcagcagtaactttttcatatcagctccagttcctgggttttcttcggcagtgttgaaacaaaggagaacttctccaggaactgctgcgcgcgtgcggtttgcgggttcgtaaagaatgcctcgggggtgttgtgttcgaggatgcgcccggcctccatgaacaccacgcggtcggcgacggcgcgggcgaaggccatttcgtgggtgacgatcagcagggtcatgccatcgcgggccaggccctggatcacttccagcacctccttgaccatctccgggtcgagggcggcggtgacttcgtcaaacagcatgacctgggggttcatgcacagcgaacggacgatggcgatgcgttgttgctggccgccggagagctggcgcgggaacgcgtcgcgcttgtccgccaggccgacgcgggccaacaatttttccgcctgttcgcgggcttcacgggggtcgcgtttttgcactttcagcgggccgagcaggatgttgtcgagcacgctcatgtgcgggaacaggtggtagctctggaacaccatgccgacgtcctggcgcacctggcgccagtcggtgtgcttgtccaacagctctttgccggcgaaacgcaggctgccgctatgggcgacttccagcccattgaggcaacgcaataaagtgcttttgccgcagccgctggggccgaggatcaccaccacttcaccgctttgcacgctcaggtcgatgcccttgagcacctgctgctcaccgaagaatttgttgaaaccctggaactcgatcaatgcgttcatgcctggccccagcgccgttccagcaccttggaggcggccgacaacgggtagcagataaagaagaaaaacaggaacagcacgccgtaaatcaacacggactcataggtgcgctcgatgatttgctggccgaccttgatcacatccaccacaccgatcagcaccgccagggaactggtcttgataatgcgtgtgtagacgttgatggtcggcggcgtcatgcgcttgagcgcttgcggcagcagcacgtagccgtacagctgcgggtcggacaggccaatcgacaagcccgcttcacgctggccacggggcagcgaatgcaacgcgccgcgcaccacttcgcccacttcactggcgccccacagcgacagcaccagcaccgcgcaccagaagctcggaatgctcaaaccaaagaaaatcggcaggccgaaaaacagcaggtacaaccacaccagcaccgggatcgcacggaacaactccaggtaaacccgcagcacgccgttgaccagccggttgttcaaggtgcgtagcacgccatacaacacgccgccgacagtgctgaaggcgatgctcaaaaatgaaatcgacagggtttgcgcagcacccttgcccagttgcggcaacgacacccacaacaactcaagacccgaactggccatgctggagcctcctttccagacggctgagcaacagtgaaagcggcaggaacagcaacacgcaaatcagcgtcagcacggcgagcatttcgtaagtcttgtagtacagggcgatgtagttcttggtggtgtagagaatctccggcaccgccacggcggagaccacggtggtctccttgagcaggaagatgaaattggcgaacagcgccggcaggctgaggatgccggcctggggcaggatcacatggcgcagcagctgccagtcggacaggccgatggacttgcccgactcgatctgcgccagcggcaccgcttccacaccggcgcgcagcacttcggtgaggtaggcgccgccgaggaaagtcatggtgatgattgccgcccagaacccggagatattgaagcccagggcgggcagcgcgaagtacacgaagaacagctggatcagcagcggcgtgttgcgcgccagctccacatacagcgccaccaggcgcgacaggtacggcgtgcgaaacaccagcagcgccgcgttgatcagcgccaccagcagggaggtggcaatggcgatcaggcccacttgcagcgtcacccccacggcctttagaaacgccggcagggtgctgaggataaaagcgaaatcgaaggtcatttccagtccatgacgccgcaagggtaatgcagcgagcgcaatccgatccggcgtgggtaacgccgggtagcgcgaactttaaaggtataaaaagcaaattttaaataccgaaatagcatattgatatcacccaaaaagataaccggcggattcgcgggtttggcgggtgagagctatggtttggaggtctgagattcgagggatcgaacaatgaacgaagcgaaaccgatggacccgcaggaactggtgaagtggttgatggcgctgcgcagggcgatcaatagcagagttctctagatcaaagcggatcaaatgtgggagggggcttgcccccgatggcggtgggtcagcaaaaaatatgctgactgaaccactgcaatcgggggcaagccccctcccacatttggattgcattccagatttcaggcataaaaaaacgccgacgctgtaacagccgtcggcgttcaaaccttgaagggggtttgggttacatcagaacgcaggcactacagcgccgttgtacttcttctcgatgaaggctttgacttccgggctggtcagggccttggacagcttctggatcgcgtcgctgtccttgttgtccgggcgagccaccaggaagttcacgtacggcgacttggcgtcttcgatgatcagcgcgtccttggccgggttcaggccggcttcgagggcgtagttggtgttgatcaggtccaggtcaacctggtccagcacacgtggcagcagggccgattccagctccttgaatttcaggtgcttggggttgtccttgatgtcttttggcgtggccagggcgttggtcgggtctttgagggtgatcacgccggctttctgcagcagcaacagggcgcggccgctgttggagccttcgttaggaatggccacggtggcgccatctttgagttcagagatgttcttgatctttttcgagtaaccgccgaacggttcaacgtgcacaccgaccacggtgaccaggttggtgcccttgcccttgttgaagttttccaggtacggcagggtctggaagtagttggcgtccagacgcttttctgcgacttgtacgtttggctgcacgtagtcggtgaagactttgatttccaggtccacgccttctttggccagggtcggcttgaccagttcgaggatctcggcgtgcgggatcggcgtggcggccaccaccagtgtctcgttggcctgggcgaagcttgcagtcagggcagccgccagtgcggtaaacaacagaacctttttcatgcagtgtccttatcgaaattccggggcgtctctgacgaccgttttttatgtagtgtgccagcgaagtgctatcgcggcgtgggagggacaatacctagtttttttattcccgaacaatatcttttattcacgttgatattccattttgttcatgcaggaatttgctcaacgtttcccgctcggcagggctggcgcgctcgaaaatccgctgcacctgttccagcgcagaacccgccaccggcagattcaaatgttcgggcaaaatctcgtcgccgctgctgaccagcaaggcaaagtggataacgttttccagctcgcgggtattgcccggccagctgtggtgttccagcacacgctgcgcggcatcgctgatcagcggcaccggcaggtccaggcgctgactgtagatgcccaggaagtattcggccagggacaggatgtcaccgacccgctcgcgcagcgccggcaactccaaccggccttcgctcaggtagtgaaacaggcgctcatggaacttaccggcggccacggcctgggccaagtcgatgctggtggcggccaccaggcgcacatccaccgggctcggctgatgggcaccgacgcgggtgacttcgtggttttccagggcggccagcagtttgacctggatcggcagcggcaggtcgccgatctcgtccaggtacaaggtgccgccattcgccgagccaaaccagccggcccggctgctggccgaaccactgtggctgccggcggcataaccgaacaattcggcatcggcataggtcgggctgatcgcgccgcaattgaccgagacaaacaaaccggtgcggtcgctgccccggtgaatatgccgcgccagcaattctttgccgctgccggtctcgccacggatcagcacgggcaaggcacgcggtgcgaggctttcgaggtcttcgcgcagttgccgcgaacgcgggtcgacaaacaccaacgccttggcgcggatactcagcgggcttttttccgcgtcgggaaaggtcagcaatggctggccgtaggtttcatgcagactcatggcaggctcccgcccccaatccactcaagggacggggcgttgaaaaaatcaggcactgcgccgggcgtgatgctcaaggcggctttgcaggcgatagaggtaagcaaagccctgctcccagcgctggtggccggacttcacattgatatgccccgcccccgacagaatgccggcttcggcgccccagttgcgggccagctccagggctcgcggggcgctgacggcactgtcgttgtcggagctgaccacctggctggggaacggcaacaggtcggtcgggatcggcgcaaaattacgcaacgcaggagagcaggcaggccgttcgacatcggccggggccaccagcaaggcaccgcgtacctggcgcaggaactgcaccggtgcggtggccgcccaatgcgccaccgtgatgcaacccaggctgtgggcgatcaggatcaccggcgtgctgtcggccgcgatggcctcggccagcgcagcaacccagtcttcgcgacgcggggtgaaccagtcggcctgctccacgcgagcgctgttgggcaggctgttctgccagtgactttgccaatgatcttctggcgatccttgccagcccggcacgatcaggtaacgaatcgactcgctgtgcatgggtgtgccctcctgcagcgtttaacgttgctgaacagtatagggatggggtttatattcgttaaggaataagaagctatttattaataaccaaaaactcaaaactaatgaagttcaaaatgtgggagggggcttgcccccgatggcggtgtatcagttacagattgattggctgacacactgcaatcgggggcaagccccctcccaccttgatcgcatttcaacttgaggattgaatcgcaggcaaaaaaaaaggccgcaccctgccaaggagacggccaaaaacttgtcgaggcttttgcaactaacgtgcggtaatcaccgacagcttggtaatccccgcgcgctcgatagacgccatggctcgcgccacttcgccgtaattcacgccatcatccgcctgcagttgcacccgcacatcagggtccttggccttggccgcctgcaggttgaactccagcaggtccggctggatttcgtccttgttgataaacagtttgccggcgccgtcgatgctcaccaccagcgggtccttctgctccaccggggccacggcctcggtcttgggcaggttgatcggaatcgcgttggtcaacagcggcgcggtgacgataaacaccaccagcagtaccagcatcacgtccaccagcggcgtgacgttgatctcgctcagcacttcatcgctgtcttgcgtggagaaggccatgtcaggaggcctccttcactttttgcggagtgccggcgccggctttgtttagggttgggtgcagcaatacgcggaaggcattcttctgcgccaggctgtagaagtcgtgggcaaagtcgtcaaggtcggcagccgtcagcttgaggcgacgcaggaaatagttgtagaccagcaccgccggcaccgcgacggcgatacccacaccggtcgccaccaaggctgcaccgatcggcccggccacggtttcgaggctggcggaaccggcggcgctgatgcccttgagcgcttccatgatgccccagacggtgccgaacaggccgatgaacggcgaggtgctgccgatactggcgaccaccgccaggccggtttccagggagcggcgctcacgcacaatctgttggcgcagggcgcgttcaaggcggtcctggtggttgatcgcctggctcaggtcagcagcgtgcgaagtttcgcccacctggatcgcggcataaccggcctgggcgacgcgggcagcggcgcccggctgggtttgcgccagttcatcggcagagtcgaggctcgacgctgcccagaactgtttatggaacttgcgatcctgcgccttgaggcgaccgaactgcacgcccttgagcagggccaggccccaggtggcgaccgaaaaaaccaccagcagccagatcaccgcgctttcgatggattcaagtggagatgctaatgccatgatgtcttccctctgtgcaggtcgcggcgtgtgcaacacaccgcagccgaatagttagtgaatcttgaaatcgatcgggacgctgacccagccgtcctgggccacatcgccctgcttggccggcacgaagctccaacgcttcacggcggtcagtgcggcgtcatcgagttgctggcgcccgctgctcttctggatctgaatctcgcccggcttgccgctggccagtacatgcacccgcaacaacaccgtgccttcccaaccgcgccgctgagccagtgacgggtactccggcgccgggttcttcaggtacgcggcgttggccgaagccggcgttaccggggccggcgccggtggagcgggaggcgcaggcggcgcgggtgtcggtggcgcaggcggttgctcgaccggtttcggtgcgggcttgggctcaggctttggcactggcttcggcttgggttttggaatcggtttgggcggcgccggcttggcggccaactcatccaccaccggcggcggtggctcgaccacgggcggcggtggtgttggcacaggcggtggcggttccatcaccggcggcgccggctgggaaaattcgatggtcatcggcggaatttctggcggcacaatcggcagcaccggggtcggcttctggctcacccagtagatcaccgcaccgtgcaggaccagcaccagcagaccgagcaggatgccttcacgacggctggagaaacgctttggcgttttctgcgtgcgcaattgccccaacggcgtgcggtgcggccggccaaggtcgaccaactcaccacccggtgcctggcgccacggcgcctcgtgtgcactggcggcggtctggacattgcccattgattcactcctacggttttaaaacaaaaaaccgacaggcctgcatcgaaggccgtcgaggagcgaatcatccgggccagatgcttatctcttaaagtaatctttgaggttatacatagatctagaacgaataaacaaaccatgctgaaacgccaaagccccgtcctgcacgggctggcctccaggcgatgtttttgcatgctttccaggcataaaaaatattcggcaaaggcatggttcagaccgggctgtttgcgcacaaatccagcaattggcgctgcaggctctgccccgcggcgcccaggccagtgcgcccatacaacgccagccgcacgccctgcaccgcaggcaacccgctgtccgcacccaatacgacatgcccggcctgcaccacacgccggggcaacagactgatacccaaccccgccgccaccgccgaacacacactcgccaggctcgcgctggaataaccgatgcgccagcgccagccgcccacttccaggtgttgcagcatttcattgcggtacaggccgcctaccggaaaggccaccaacggcaacgggtcgcgccccagggagggcgtactgcggctgtccacccagcacaacggctccggccatgaggccaggcagtcatcgctgtcgcccatttgcttgaccagcaatacgtcgaactcaccgctgcggtactggcgctgcaactcgggaccgagaccgctggtgacttccaggcgcaccctgggatacgccagcacaaaagccgataacagcggcatcaggcgttcggcagcgaagtcttccggcacaccgaggcgcagcacgccgtcgctttgctggttgatcaagacatcggcggcttcctcatgcaacgcgaggatgcgccgcgcataggccagcaggcgctcgccttccgccgtcgccaccacgcggcgttggtcgcggtcgagcagctgacacgccaccgcgtcttccaggcggcggatctgctggctgacggtggactgggtcaagtgcaggcgctcggcggcacgggtgaaattgccgcagtccaccacggcgacaaagctgcgcaacaacacaggatcgaacatgacgctcaccattccatttgccactgattggcatggttatatttaatttcagaatacctcggcgactggcgatacttcacgcctcctttgcacacgccataggttctgcatgtcgctcaactcttcaaccgcaggtcggttcgctggctggggcctgctggtggtcctgggactgaacctgcggccgatcctcagttccatcagcccgttgctcggcgagatccgcctggtcaccggcctcagcttccagagcagcgccctgctcaccagcctgcccgtggtgtgcatgggcttggtggcgctggtgggcgtgcgtgttgaagcgcaactgggtgagcgacgcggcatcgccctgggcctgctgatgatcctgctggcgtgcctggcgcgctggctgatgggccagggctcgacgctgctggtcacggccttgctcggcggcgccggtgtggcactgatccaggcgttggtgccggcgatgatcaagcgcgaattccatcaccgcgtgcctgtggcgatgggcgtttactcggcttcgttgatggcgggaggcggtctggcggcgctgctcagcccggtggccgccacgtatttccagcactgggaagccgggttgggtgtgtggttgttacccgcgctggcggcgttattgctgtgggcctggttgccgctgggcgcagcgaaaaacccacaggtgccgcctgccttcaagggcctgcgcaatcggcgtgcctggctgctggcgctgtatttcggcctggtgaactgcggctacatgagcctggtggcgtggttgccggcctactaccagcaactgggctggggcgtgttgcccagcggttcgctgctggcgttcatgaccatcttccaggtgatcgccgcgctgttgatgccggtgctggcgcaacgcggggtcgaccgtcggccattgctgtggatcagcctgctggcccagaccctcggctacctcggcctgttgctggcgccgctggaatttccccacctgtgggtggcgctgtgcggctttggcctgggagcatgttttgccctgagcctgttgctgaccctcgaccaccaccgcgacccgcgccaggccgggcaactggcggcgttcgtgcagggcgtgggctttttgatcaatgcgatttcgccatggatgaccggctggctgcgtgaactcaccggcagctttgtcagcgcgtgggtggtgttgacggtgacagccgtggccatgctgctggtgacgcgggtgttcagcccggcgacgtaccgcacggcacctgctctatagatatgcatttaagatctagataaaacaaaaatgcttcgttgacggaataagtagtgcccttaaaatcctggctctcctacaggatgccgggcacaccatggaccttcgccaactgcgctatttcatcgcgctgaacgagcaccgtagttttgtgcgtgcggcggacgccatgggcatcacccagcccgccttcagccgcagcatccagggcctggagcaagagttcggctgcgtgttggtggaccgcgcccataaagacctgcgccccactcccgaaggccaagtggtgctgcaacacgcgttgagcctggtgcaaggcgcggcgctgttgagccatgaagtcacgcgcatgaccaaactcgacgccggcgaagtgcgcttcggcagcgacgccgtggccgcggtgaacctggcgccccaggccatggcgcggttcatcacggtttaccccagagtgcgcaccgtgttgcaggtggacaactgggaaaaactcgggcgcagcctgagccgtgaagagatcgaattctttatcgccgatgtgcgtcacttcgaggcggacccgaacttccagaccctggccctgacacctcggcgcagcgtgtttttctgccgtgcagggcacccgctgctggccaaggacagcctgtccaccaacgacctgttcggctacccgctggccacaccgctgatcgcgccgggcatccgaaaactgctggccaatctcagcgggcgcgtcgacttcgcgcccgccatcgagctggagcagcttgccgcactgaccaccatcgtgcgccagtccgatgccattggcctgggcgccgaagaggcgtttgtcgaggagttcatcaagggcgagctgcacgcactgcactggcgcaacctgccgcacgccctggacagcctgagcaaccgctgcggggtgatcagccgcgctggggtgcgcttgtcgcctgcggcgaaggcgttgatcgaaaccctgcaggcgctggaaaacccaaccgattggcccgtgcaaacgtcccgaaatcattgaagcgcacgcccatctgcgccatgaccttgtgcgccaccttggcggtcatctggcggatgtagaacggctccttcaccacaaagtggtggatgccatgggtgctgccgaagttgaagcagaacgcctgcaacggccacagccaccaggggttcaagacctgggtctgctggatcacgttgcccagctccacatcaccgtagtagtgcatgttggagctgacgaagtgcaggcaaaaggtgcgcagcacgttagggccgatgatcaccacggcggcgatatcgatcacctgcatcatctgcaaggtgccggccgaccagtcgatcggcgcacccagcaggccggcgatgccattggcggcatgaaagccgaggaacacataccacgcgccccaatgcagcagcgccagtggcgcgtacaccagcagcgagcgcttgaggatcgtcagtttgtgcgtccaggtcttggcccgcaggatgcggatgaaggccgacatgacgttatcgcccaccatcagcaagcgcgcaaagccccagggctcgccgttggtaatggcgcgctcttccatgtcggtttcggtgccggagaccttgtgatggttgaggtgcagatgccggcgtacccacgggttgatggtgctgggccgcgccagccataccaggcccatcatcaggttgtggggcacgcgctgcttgcgaaagtacatgctgtggatcaggtcgtgttccagctcgtgggtcagtgaagccaggaacgcgttaagcagcaggcagacccaccaagccatatgaccagtgatgtagagcgccgccgacccgagcatgcccagcaacgcaaacgccaggatgcccgcgcccaacgcgtcctgatgcagcagccagggatgctgctggcgcaggcgcacgccctcggccagcaccacgtcacggatatgcgccgagcgctgttgtgcgttcatctgctggggacttgcagaagtaccgtccatgcttccatcctctggtgtattgatggatgcatcctggcccaagcggtccgccagggcatcggccacacacgccaacctgttgaccgcaagcgccaatcgccatgaccgagcccacctccctcgccagctggacccgcgccctgcgcaagcaactcgacgccctgggcctagacagcgccgcgttgtgcctgcaagccgggctcgacccgcagctgatggacgatcccaacgcgcgctatccgctgtcggcgaccacgcgtttgtgggcgctggcggtgcaggccagcggcgacccggcgattggtttgcgggtgtcgcggttcgtcagccccaccacctttcacgcgctgggctatgcgctggtggccagcggcagcctgcgggaagtgttcgagcgcatcgtgcgctaccaccaggtggtcagcgatgcgctgaccctggagctgagcggcgatggcgagcgctatcggtttcgcctgttgcaactgcccggcaacccggcgccggctttcgaagccatcgatgcgtttgcagcaatctacgtgcgcacctgccgcaatcgcctggggcgtgaatacgcgccgctggcggtgtacctgcgaagacccgagcccgcagaccccaagccgtggcacacggtgtttcgtgcgccggtatttttcggcgccgaagaagaccgcctggagtttgccgccatcgatttcgacagccacctggacgacgccaaccctgagttggccgagcacaacgaaaccgtgctcaagcgcaccctcgctcaattgcagccactgacctgggagcgcaaggtgcgtcgggtgatcgaagcgcaattgcccgacggcgagccaagtgccgaacgcgtcgcccaggcgctgcacctgagcctgcgcagcttgcagcgtcacctggcggatgaaggctgccggtttgatgcgctgctcaatgagtgccgcgagaacctggccttgctgcacttgcgcgacccacagtgctcattggccgagatcagtcatttgctcggctttgccgataccagcagcttcaaccgggcgttcaagcgctggacgggaatgacgccggggcagtttcgggatgggctgaggtagggatttgtagtggctgggagggcctcatcgggggcaagccccctcccactgttgatctgtgaatacgttcaaaaatgtgggagggggcttgcccccgatagcatcagaatagtcaccgcccccgccgcagcagcttcttcactcgcgccaccagcgtcttggccgcaaatggcttgagcaaatagtcatcctcatgcaattccaacccgcgcaggcggtcttcaatcccgccgggcgtggtcaggaacaacatcggcgtctggcccttctgccgaatcgcctgctgcaacttccaggcattgagccccggcagcatcacatccaggatcaccaggtcgtactcggtgctttcaaccaagcgcaacgccgccatgccattggccgccacctccacggtgtagccggcctcgttcaggcccacggccatccgctgtgcctcgtcggattcatgttccactaacagcacgcgcataacacacctcgattgataggcgtgcaggctaacaccctcaggggtgcgccgcctgccgtagccgctgtacgtcgaggatttcgatctcgccgtagcccaggcgcacgacgccggcggcttgcaggtccttgagcaaagcgttggtggtctggcgcgacaggttcaacatggccgccaggtcttcctggggcaattgcagcacgcgtttagcatgttcgttgtcgccgtagccctcgacgatcatcaacaagcggtgggccagccgcaccggggccggcatcaggctgagctgctcgaggccgatgaaactcaggcgcagcttctggctcatcagcagggccaggtcgcgccagtatcgcggggtctcgtccaggatgcccagcagcgcctgctgcggcacctgcaacagtgtgctgggacctaccgcgcaggcgtcgtgggtgcgcggcaggccatcgaacaggcagatttcgccgaaccagaaaggtgcctccaccaggctgagtatcgcctccttgccctgctcgttcaccgcgctgacccgcagggtgccgtcgagcaccgcatacaagccacagggcgggtcgccgcgcttgaacaggtattgccccgccgtcagctgccgcagccgggcatgggccagcagactatgctgaaaaggcgccgccaggtggctgaaccagtgaccgctggccaaccgggcgcgccattgttctgcgtccatgtgaactccgaagattgtcgcccagctgacagttcgccacaggctgacggggcatgatcaaacatcctacaggaggaataacaatgaaaagcctcgtcgatcacctgagtcaatacgctgcctaccaccgcgatccgcgcaatatcgccagccactttgttggcatcccgctgatcgtggtggcggttgcggtgttgttgtcacgcccggaatgggccgtcgctggcatatggatctcacccgccgttcttctcgcgctgttctctgcgtggttttacctgcgcctggaattggccctgggcgtgttgatgaccgtgctgatggcgctgtcggtgtgggccggacacgtgctggcggcgcagagcacgctggtgtggctcagcagcggcatcggcctgttcgtggtgggttgggtgattcagtttgtcgggcattactacgaaggcaggaagcctgcgtttgtcgatgatgtgtcggggctgatcgtcgggccgttgtttgtggtggcggagttggcgtttctgctggggttgcggcagggtttgaagcaacagatagaggagcgctcgggaccggtggttcgacgcgatctgaagccgagagaggcctaaatgtgggagggggcaagccccctcccacattggccccattttcacattgggtagtgcggggttatcaggctttctgccagaccttgggcttgaagaacagggtctcgccgcgtgccaggccggtcaggctgtcgtggtctttcaccacttcggcttcgatcagctcgctctggccttccactttcaaggtcacacgggtggtagcgccgagcgggcggatatcccgcacttcagcggcgtggtggtcttccagctcatgccgcgacagcgacacttcgtgtggacggaacagcacgtgcttgtcttcacccaagtgcaggcggttcgaatcaccgaggaagtgatagacgaaatcgctggccgggttttcgtagacgtcgcccggtgagccgatctgctcgatcacgcccttgttcatcaccacgatgcggtcggcgacttccatggcctcttcctggtcgtgggtcacgaacaccgaggtcaggttgatgtcttcgtgcaggcgtgccagccagcggcgcagttctttacgcaccttggcgtcgagggcgccgaagggctcatccagcagcaacactttcggctcgaccgccagggcgcgggccagggcgatacgttggcgctggccaccggaaagctgctccgggtagcgatccgacaaccaatccagttgcaccatgttcaacagctcatggaccttgaccacgatctggctttcgctcgggcgctggttcttcggtttcatgcgcaggccgaacgccacgttgtcgaacacggtcatgtgacggaacaacgcatagtgctggaacacaaaaccgacgttgcgatcgcgcacgtcgtggccggagacgtcttcaccgtggaacacgatgctgccgtcatccggggtttccaggcctgcaatgatgcgcagcaaggtggtcttgccacagccggacgggccaagcaaggccaccaactcgccactctggatgtccaggttgatgctgttcagggccttgaaggcgttgaagttcttgctgacattacggacttcgatcgacatgacttattcctcagccgcaccggcgcgcaggcggttaatacggttctcgctccactgcttgagcagcaggatgaagagcgccaggatcagcaacagactcgccaccgcaaacgcggcaacgtggttgtattcgttgtagagaatctcgacgtgcagcggcagggtgttggtcacgccgcgaatgtggccggacaccaccgacaccgcgccgaactcacccatggcccgtgcggtacacagcaccacgccgtagatcaggccccatttgatattcggcacggtcacatgccagaacatctgccagccattggcaccgagcaggcgcgcggcctcttcttcctgggtgccctgctcctgcatcagcgggatcagttcacgggccacgaaaggcacggtgacgaagatggtcgccagcacgatgccgggcaaggcgaacacgatctggatgtcgtggtcctgcaaccacgggccaaagaagccctgggcgccgaacatcaacacatagaccaggccggcgatcaccggcgataccgagaacggcaggtcgatcagcgtcaccaggatgctcttgccacggaacgagtacttgctcacgcaccacgcggcgctgacgccgaacaccaggttgagcggcaccgagatcaccacggcgatcaccgtgagtttcaacgccgacagcgcgtcgggttcgaggatcgcggtgaagaacgcgccgaggccgttcttcaggccctgggtcaccacgataaacagcggcaacaacaggaacagggcgaacaccagccagccaaggccgatcaggatgcgtcgcgacgcggcgctgccacggcgggcagcgttggccgaggacgcggcggaaatagacgattgggacatgttccgcgcctccttatggacgttcgatgcgccgctgcaacaagttgatcagcagcagcaggacaaaggaaaccaccagcatcaacacgccaatggacgtggcgccgcggtagtcgtattgatcgagcttgaccatgatcagcagcggcaggatctcggttttcatcggcatgttgccggcgatgaaaatcaccgaaccgtactcaccgacgccacgggcaaacgccagcgcaaaaccggtcaaccaggcgggcagcagcgccggcaccaggatgtggcggaacacctgcaacggcttggcacccaggcacgcggcggcttcttcgacttcccgggggatatcggccaacaccggctgcaccgtgcgcaccacgaacggcagggtgacgaaggtcagcgccagggtgatgcccaacggggtgtaggcgatcttgaagcccaggtcggcggcgaactggccgaccagcccgttaggcgtgtacagcgcggtcagtgcgatgccggcgacagcggtgggcaaggcgaacggcaagtcgatcatcgcatcgatgaccttgcgaccggggaaggtgtagcgcaccagcacccaagccagcagcgtgccgatcacgccattgatcagcgcggcgtacagtgcggtgctgaagctcagttgcaacgccgccagcacacgcggtgcggagatgatgttccagaactgatcccaggtgagttgagcggcgtgtacaaacatcgccgccagcgggatgagtacgatcaggctgaggtacaccacggtgtagcccagcgtcagcccgaagccgggtatgacgggggagatacgacgcgacataagagtccttggttaagggaactgacacacaaaacccgcaggtgaatgcgggctctgtgggcgggttgttgctcggcttactgcgcggtgtaaatctggtcgaacacgccaccgtcgttaaagaatttcggttgggcagttttccagccgccgaagtctttgtcgatagtcaccaggtccagtttcgggaactgctgggcgtatttggcagccacttttgcatcgcgtgggcggtagaagttcttcgccgcaatctcctggccagccgggctgtacaggtgcttcaggtattcagtggcgatttcggtgttgccctttttctcggcgtttttgtcgaccacggccaccggcggctcggcgaggatcgacagggacggcacgacgatgtcgaacttgtcggcgccaccgtcttctttgagcgccaggaacgcctcgttttcccaggccagcaacacgtcaccctgaccgttgttgacgaaggtaatggtcgagccgcgagcgccggtgtccagcaccggtacgtgcttgaacagctccttcacgtattcctgggccttggcttcgctgccaccggccttgaggccataggcccaggcggcgaggaagttccaacgggcgccgccggaggttttcgggttcggggtgatcacggacacgtctttcttgatcaggtcgccccaatccttgatgcctttagggttgcctttgcgcaccaggaacacgatggtcgaggtgtatggggtgctggcgtccggcaggcgggtctgccagttttccgggagggtcttgcccagcttggcgatttcgtcgatgtcaccggccagggccagagtgaccacgtcggcgcgcaggccgtcgatcacggcacggccttgcttgcccgaaccgccgtgggattgctggatcttgacgttgtcgcctgggtgggactgtttccagaagttggtgaactcagcgttgtagtcctggtacagctcacgggtagggtcgtacgagacgttgagcaactcgtagtccttggcaaccgcggaacctgcaaacacggcgctggccagggcggccagggcgtaacggcgaatcgacgacatagaagctcctgaaattcttggggtgttggctttttttatagttgcgggtctatcgccgttcttgctcagctcggtttgttacccgggttctgcaggcggaatttttctttgcgttcgatctggaccacttgggcgttgtgcaccgtgatttccaccgcgccaaaccgcagatcgcgcagggcgctctggatctcacgcaaaatggctgcttcgtcctggccgtcgacgctacgtagagatgcgctcatggtctcgctcctgaaatgaatagtgcctcgcagtggcggcactgcttgcggcgtgagggcgatagtagataagcgcggatattcttaaaaatactatttaagaatgtttatataaccagaaagaattttctggtgggacgcggggttgcgcgcagatcgctttcaaatgtgggagggggcttgcccccgatgagggagtgtcagtcaactaatgaggggctgatgcacctctatcgggggcaagcccactcccacatttgaaagcatttcaggttcggatcgcgggtgccttggaccaatctagttcgcccgccggcatcggccggccaaaccaatacccctgccccatatcgcactgctgatccaacaggaaccgcgcctgttccacctgctcgatcccctcggcatgcacctgcatgcccatgctttttgccagggcgatcaccacgcgcacgatcgctgcatcgtcctcgtcccacggcaacccggcgacgaagccctgatcgatcttgagcttctgcaccggcaggcgcttgaggcgcaacagcgaggaataaccggtgccgaagtcgtcgatggccaggcgtaggcccagttcgcgcaggcggtgcagttgttccagggctacttccgggtcgtccatcaccgcgctttcggtgacttccaactccaggaaagccggatccaggcccgtgtcgtgcagcacctgggcgacctgttcgtagagctcgcgccgggcaaacaggcggctggacacgttgatggcgataaaactcagtggcgccccattccccagccagtcgcacatttgccggcaggcccggtccatgacccaggcgtcgatatcggcaatcaggccggtgcgctcggcaatcgggatgaactcgcccggcggcaccagaccgcgctccgggtgctgccagcgcaccagtgcttcgacgccgatcaggcggctgccgttcaggtcgtgcaccggctggtagtagacgcacagctcctgctgttcaagcgcacggcgcaactcactggcgatctctacacggttctgcgcatgggcggtcagttcttcggtgtacagggcataaccttcgcggccagcactcttggctttgaacaacgcggaatcggcgttgcgcagtaactgctcggcgctcaaggcgtcgctggggaacaggctgatgccaatactcgcgctgataaacagctggtggccgtcaaagataaatggctgtttcagcgcctccagtatgcgttgcgccaggcccgcagcctgggccacctgtggacaactttctgccagcacggcgaactcatccccacccaggcgcgccagggtcacgcccgggccgaacaacgccttgagccgttcgccgacgactttgagcaactggtcgccaacgttatggcccaggctgtcattgatgattttgaagtggtccaggtccagcaacagcaaggcgcaaccacgcttgtgaatctgcgccgaggccagcgcctgttcggcacggtcggtgaacagcaggcggttgggcaggtcggtcagcgggtcgtgatgggcgaggtgggccagttcgtgctcggagtccttgatggcgctgatatcggaaaacaccgcgacgtaatggctgacgtggccctggtcatcgtgaatcacgcgaatggtttgccactgggggtaaatctcgccgcttttgcgtcggttccagatttcaccgctccattcgccggtacgctccaggctctggaacatctgctggtagaaatgcgacgaatggcgcccggacttgaacaagctgggctgctggcccatgacgtcttcgcggctgtagccggtgatcgccatgaaggcgcggttcacgtgcacgatcagcccttgcgcgtcggtgaccagcacgccttcacgggtgcaatcaaacacggcggcggcctggcgcaggcgttcgcggttttccttcaacggttgctgcaactggttggcacgcgcaaatcgggcgcacatcaggtaaatcgccagggcgctgagggccacccacacatagccccgcacttgcagccagcgtcccaactcccgcggttcatcgagaaagctgatcaataagtggttgctgagctggagccatgcgacagaaaccagcaggtataccagccccgcgcgtagggcaccacggtatgaatacagcatatggtcagtaatccttaccaaaaaaacataatcgccctataaacgctgcggattatagaataagtaacatctcgtaagtcttatctgaaagggtcgctggttttctctgtaggcttagtgataatgcttgagctgttcttttctttatctgagggccatacagcctatgtggtacaacggttttcttgacctatcagcctggcaactggtggcagtcacgctgttgatgacccacgtgaccattgttggggtcacggtctatctgcaccgttattcagcccatcgctccctggagctcaatgccggcctgaaacacttcttccgcttctggctgtggctgaccacggcgcagaacacccgcgagtggactgccatccaccgcaagcaccacgccaagtgcgaaaccgtcgatgacccgcacagcccggtcatcaaggggctgtccactgtgctgcgcaaaggcgccgagctgtaccgcgccgaagccgaaaaccccgaaaccctgcgtatctacggcaagaactgcccggacgactggatcgaacgcaaaatctacaccccctacccactgctgggcgtggcgatcatgggtgtgatcgacctgctgctgttcggcaccatcggcattaccatctgggcgatccagatgatgtggatcccgttctgggccgccggcgtgatcaacggcctggggcatgccgtgggctatcgcaacttcgaatgccgtgacgcggcgaccaacctggtgccgtggggcatcatcgtcggcggcgaggagctgcataacaaccaccatacctaccccaactccgccaagctgtcggtgaaaaaatgggagttcgacctgggctgggcgtggatcaaggtgttcagcttcctgcgcctggccaaggtgcagcgtgtcgcccctattgcccaccgcgtggaaggcaagggccacctggacatggataccgccatggccatcctcaacaaccgcttccagatcatggcccaataccgcaagttggtgatcggcccgctggtcaagcaggagctggaaaaggtcgatcactcggtgcgccatcagttccaccgcgccaagcgcctgctgtcgcgggaaaccagcttgctggatgaccgccatcacgtgcgcatccagagcctgctggaacacagccatgcactgaaagtgatctacgaaaagcgcctggcgctgcagcagatctggctcaagaccagctccaatggccacgatatgctggcggccatcaaggaatgggtgcatgaggccgaggccagcggcatccagtccctgcgggattttgcgcaccaattgaagacttattcgctgcgtcctgcggcggtctgatgctgcggtgggagggcttgccctcccacctatcagctttttggcgtcatttaccgggcaccggcaatcggtcctgttgacggaacttcactgaaattcgcctctctcaatgaacacttcgccatcatggtggccccttgtagtgaccgctgctcctgtttgcggcgcgcccagagagagttgtgccgatggttcacgaaaagtcctccttaatcgacgcgccagcagctgagcatccccgcccagcagcggcggcgaccctgctggcgctggtgcatgcccagggcgaagtcgagcgactgagcgaacgtgagcaactgctgagctcaatgctggtcagcgtgaatgccgtgctgtgggccatcgattgggaaacccgccgcgtgctgtacgtgagcccggcctacgaacgcgtcttcgggcgctctgccggtctgctgctggccgaccaccgggaatggcgcaacagcatccaccccgaagacctcgactacgccgaacacagcctggctcgtgtgctggaacagggcgccgtggaagaccgcgagtaccgcatcatcactgccgacgggcagatccgctggctgagtgacaagtgctacatgaaccagcaggtcgagcccggtgagccgctgatcgtagtgggcatggccgaagacatcaccgaaaagaaacagctggaactggagctgcaccgtctcgccaccaccgacgtgctgacccagagcagcaaccgccggcacttcttcgaatgcgccaaccaggccttcgacagtgcctgtgcccaaggtgcgccgctggcctttctgctgctggacatcgatgacttcaaggacatcaacgacagctacggccacctggagggcgaccaggtgctgcggcgtatcgccgagagcggtcgaggggtgctgcgccgtggcgatctgttcgggcgcatcggtggcgaagagttcgctgcggtactacccggctgtgcgccggagatggcactgcaggtggccgagcgcctgggccgggagatccaggaactcagcttcagctacgaaggccaggccttcagcgtgaccatcagccagggcctggccagcctcaccgagcacgactcgaccctggacagcctgttcgcccgtgccgatgcggccatgtacgaggccaagcgcctgggcaagaaccgcgtgatcgcgggctagtagtcaacactgctcaaaggtgggagcaagccccctcccacattaggatttgcgcactcgggtcagctccgacaagcccaccttgagcaatcgcgccgtcttgcccgccgccagttcttccaggccttcatgctcagtcaaacgcgccatctgcgccgccagattcaccaccagcgcatcccgcgcatacacaccgccctccaacgagtaaatcgccgcaatcaactggcgcagctccaacggcaagcgccaacgcgcacgcagtgccgagccataggcagcgccaaaggtgtagagggactcgccaatcgcttcgtcatccagttcaccgccaccctggcgccagtcctccaggcagcgcaacagcgccaggtcgcccagccgatggaggatccccgcgctgtagcagcgttcgtgatccagctcaagcatgcgggccaggcgccgggcgtagtcggcagtgtcctgggacacttgccagtgccgctcggcataggcgaccagcgccgggtccccgagtaccacgttgtgcttgagcgccaggcccaggatcaggttcatgctttgccccggcaccagcttgtgcagggcgccgggcagggtctgcaccggtgcgccgtgatggccggcactgttggcggcggcgatgagcacggcggtgatttgcgggtccatgcgcacctggtcttccagatgcttgaggtccaggccttccggcccgaggctgtgttgcacggcggctttcacatcgacccgcaatggcgcgccgtcggacgcttcgcggcgtcgctcaaggaacactggcaaggtcatgccgggcgccaacggtgggatctcgcagtacaccgtttcgccttcgttgagcagcaggtcctgcaggcgctgggtcaggccttccatgttcaggggtttggtcaggtacgccgtgggcgccaggggcaaggcttcgcgcacgctggcgctgtcattgcgactgctcagcagaatgaacggcagcaaaggcgagcgacgcttctggcgcacgctgcgcagcaggctcaggccatcgatgcccggcagctcccaatcggccaggatcaggtcgtaggccttatcccgcagcagggtcgccgcttgctggccgtccgcacacacatccagccgcgcatcgcagcgcacattcaacaacacttgcttgagcaggtcccgcgaccaagggtccgcctcggcaatcaacacgcggggtacagcgggtaaatcaacagcagtcatccagcacgctccatcggcaatgcttgcaaccttagtcaatggagccgcctacgtacaatgaacacgggctgaatgtgcggcaatgggcataaaaatctatggtcacccccatttttgcaatactgattaacgggtggtgtggttggcttgcttaaatctatccggcgtctgtttggggcttgccccagcgccacgatgagagtcgcgcc

SEQ ID NO: 46 - DNA, 380888 bp, Pseudomonas nodulensis
  misc_feature (116870)..(116918): n is a, c, g, or t
  misc_feature (277712)..(277750): n is a, c, g, or t
  misc_feature (308799)..(308804): n is a, c, g, or t
aacccggcaggacgccgggttagccgccccgcgccatggatggcgcgtggcggcggcccacggattcaagccggagtgagggcacaccgagcctaagcgaggtgccgagtgttggggcgaaggccttttgcttacttttggctgggccggcttccggcctttccaaaagtgagccgctgtaagagcggaaccataagtagccgttaccgaagaaacggatatgtacacttacctacctacctacccggccgcaacaaccgcatctgctgccgataatcatccgtcacctgccgcgcctgcccactactggtaatcaccctgggcgtaatcaacacaatcaactccgtccgatccttggacttgctggtactcccaaacaaccagcgcaaccccgggatctttcccagatacggtacggcactgacactctccccgttgtcctgcttgatcaacccccccagcaacaccgtctgcccactctgcaccgccacctgcgtcgacaccgaacgcgtcgaaatacgcggattcaccggcgtatcgctggtaccactctggctctcggcatcactgacctgctgctggatatccatgtacaccaacccccccggattgatccgcggcaccacatccaggatcaccccggtctgcacatactcgacactgctcaaggtggtgtccgcatccccggtgttgacggtggtctggctgatgggaatgttgtcgcccacctgaatctgtgccggctggttgttcatcaccaccagcgacggcgccgacagcacctgggtgcgcccattggtttccagcgcatgcaacgccacctgcaggttcgagctgacaaacgaatagaacaacgaatccgtcgcccccagccccgccccaccaccgcccagcgcgccctggctgccggaggcattggccaccgtggtgctgccagaattgcccgccaggcggcccaagtaccactgcacccccaggtccagctcaccggtgagcttgacctcaagaatccgtgtctcgatctgcacttgcagcggtgggttgtcgaggcgcttgatcgccgcttcgatctctttccactgcgcaggacgggtgcgcaccaacagttggttgctgctcttttgcgcggtgatacgggtgccggcctccagggcgttggtggcagcgaccggctgctcttccggctcgggttcttcaacggcaggagggttgttctgcaagccaccggtattgagtgacgacagggtcgtcgtgcgcaaccccggcgcgaccttggccggcgtgtcgtccttgatcgcgccggtgccgtagatctgccgcaggtacttggccaggtcgacggccttcatgttgcgcacgtcgtagacgtacatctgtggctcgttgccgccgccctcgtcgatggtgcggatccagtcgccgacttcgctgaggtactggggctgggaagaaatcgccaccaccgagttggtccgttcaatcggcaggaagcgcagcatgcccgccaggggcatgccgctgtcagggccgaacaggctttgcaactgaggcatcagctcggccaccgacgcgcgttgcaggccgaacacacccaccgacatgcccttgagccagtcgacgtcgaaggtgtcaatggtgtcctggtagttggccagttcatccggcgtgccggccaggctcagcacattgcgcgccgggtcgaccagcagaaacgcgttctcgcgggcgaagggcttgagcagtttctgcatctcggtggcggagatgtagcgcagcggaaacagccgcgccgacaagccgctggaaggttgcgccacgctcatctgcggcaccagcttgcccgccaccgcctggctggctggcaggatcacgtagcggtcgccctgcttgatcattgcgttgtcggtccaggacagcagggtttcgaggatcgacaaggcctgctgcttgtccaccggcctggaggtggaaaagctgacgttgcccttcacaccctgggcgatgctgtagttctcgtgcaacaggtcgcccatcacgctgttgatcaccgcttcgatgggttggtcggcgaagttgaacacgatgtcgccgccctctgccttcgcacccggcgtggccgccggcgcacgcacgaactgttggttgccccggatcaactggcgctgcgcgggagacttgaccaagggctgggcaacttccgttgggggcgcctcgctgggtgggcgttgcgcgccggtgccctgcatggcctcgtgcagaagctcatcatccggttcgagacggtcgggaaagctgccacagccgcccagggcaagggcggtggccaggcataacgtggaggtgcgcatgtcgatcaagggaggggctcgcggggcaaagtaagggggggtcgcttggacggtggcggcaagcgcttggcgtagaagctcaaggtctgggtgcgaccgtccaggctgaaacgggcggattgcggagtgaggtgttccaggcgccagccgttgggcagggtctggcccaggcgcacggtcagcagcgggccgtcgacctgcttgagcatggccatctgcaggttgccggtgatcatgatgccgctgagggtgagatgggccaggctgctgacctgcgccttgcccaccacacgatccgggctgcgatccgggctgaacagcggcgcttgccacgtggcggccaggttgtccaacggcacactgggcagcccttttacttgaggagtgggatgggcgcgcacaggcgcttcgggcagccattgcggttcatcacccaggctgctgaggatcaccgccatcagcacgcccagcaaccccgacaggccgagcaagccccactccacggggcgcaaccggctcatcatggcgtcacccgcgacggttgcaggtagccgcgcaccagcaggtgcaccaccagcttgcccgcaccaccactggccggcgcctgctggctgcggcggatgcgcagctcatccacaaacaggaacggcggttggtattcgagctcatgcagcagcgcttccaggggctcgatggcgcaatcgagtgtgaggctgaccttgacctggcgatacggctcgccgtcgtcctgctccggggtgatgggcttgcgttggctcaggctgcacccgccgccgaggttggcgtggctgttgatcaggtcggcgaggcgttgcatcagatcggcggcgaccacatccgggtcgtcccccggcagcaggctggtgctgctggccgggtcctgccgcgcctgctcaagttgctggcgcaagccatcgcgttggcgcagtacaccggcatagcgttgttgttgctcgcgcagttgttcggcctgttcacccatgtcacgcaagggtccggcaaaccagctgtcgaccaacagccagtaagccgcgccgaccaccacggccagcagcaacaaggccgcgccgcgacggtcacggggtgtgaggggtcggcgcatcggcagcctcctggcgtaggtgggcgcgcagggcaaactggtccttgccggtgcgcgcatcgggttggatcaccccttcgaactgggcgttttccagactgcggcaacccttgatgcgagtgatcagcgcactggccttggcgctctggccggcgatggaaatctcgccgtccttcacgtccagttgatccagccaggtgtcggcgggcaggcaggtggtcaggtcgttgagcaacgctgccagtggcggttgcgccagtttgcgccgggtgaggtactgcgccgcgccgcgggtattgagcagttgctggcgcagcgcatgcacctcggcgacctcggctttttgctgttggacgctggcgtgcataacgtcgataacgcgctggcggtcgttgagccacagcagcatcgccgcgatcagcaacgccccgcacagccacggcaggctgcgttgcaagcccatgccggcgggccgctgcgggcgcaatggcgcgggcagcaggtcgacgccgaggtccgccgcatccacgcgatggggatgcaggcccagggtggcgcagtcggcgaggatctggtccaggcgttcgcgcaggatcgccaccaacgtcacctcaaggtgggtggaagtacgtcgctcctgacgcgccacaaagtagagttggtcggcctcgaacggggtgtagcggtccagctcgtagccgaccacggcgctgagattgcgccccgccgccaagggcagttgcacgctttgcaccagcacagcgtcggcgccgagcatcagcacctggcgcgtgttggccgctgcgaccggcgcgctcagtggccagtggtggatctgctcgggtggctcttgccacgccagccacgcgggtacacaggcgcgcaactccacgatccatgcgtgccacccctgttgcagcaggctgccgcgccagtgtcgggcgatgggttccagtcgattcattcttgccaacgcaacacccggtagggttgtgcgctgtcctccgatgggctcaataaaacggtgacttgcaggcgcgcctgataaccgccgggccgctcggcgcggctgtcgaccaccagtacctcgccggggtccacgccttcggcgttctggcgcggcaggttcagcgccttgcgcatcagcgggctggcgaaggcgggatcggggcggtccaggtcgctccacaaggtgatctcgggcagcaagcggctgtagagggtttgcgtcatgccgggcaattggcgtacttcttccagcacccgcaacggcgccaggccctggttacgtcgtgcttcgagggccgtggccagttgtgtggcctgggccggggtagcgccacaggccagggccaggcgcgtgaagtcctgggcatcagcgttgatcaggtagagcttgccgcgctcgctgcgcaggctcacgtgcaattgggcgtcgtcaaaggccagggggatgtcgcgaccatcggcaacccagtgccgatcggccatgacctgcgcgataccggcttcggcggccaacacggtctgggtgtgctggcgcagccacagggcctggcgactttccagctgtacccagccggccaggccgccgagcaacacgctgagcaacgccagtacccacagcaccagtagcaacgcagcaccacgttggcgcttcattcttcaacactcccgctggacaggttcaagcgcaaggcaatcacctgggtgacccagggcaccggccccgccacgctggcagcgatgcgcacggccgaaggcaagcgcctgggccagggccattcactcacccagccggtgggctggcccagcggtgactcgccgcgataactgaactgcaacgcctcgatgttgttcagcagcacctggggttcacgttgagaaaaccccacctgcaacgcctgttcgacccgttgcaggctgaaccgatggatcccgccaccaagcacaccaggcaaggtcgagacaaattccagacgctgcgccgtgcccacgaaaaaaccatcgccctcgcccaccgccagcggcaacgcctcgctgatcgccgtgcgcaaaaactgttgggcggcgcgcacttcatccaggctcaccgtgtacgcctgggccttggacacggcgcgattggcccccagcaatgcgccgccgaccagcaccagcaaaacgccgagcaagctgagcaccacaaggatctccagcaaagtgaaaccctgctcgcggcgcttcacaggcgcgccttcaaggtgctgaagcgggcctggtgcgagccttcgctgaggaccaggtcaagacgcacgatccgcgcttgctgccgggtgctgatcagttgccaatggatgccgtcgagttcgccctggctgacgccgttgctcaagcgccccgccgcttcctggtcgaaaatcgtcagcgccgcgtgggtcagccggtcactgtgggccacctgggacaacgagcgcgcactctggccaaaggcaaccagcagcaccgtgctgcacaccgccatcagcgtgagggcggcgagcatttccagcagggtgaaaccggcctggcgcttcatggcagcgccttggcttgcacgctgccggtgagccagccgatatcgatgcgccaacgccgggcaccattggccacgaggagattgccgccggtggaactgccgtcggggtagaactcgacaccagggccgacctgttcggcggtgtgcagcgtcacatgcaactcggacggccaccgttgcaccgctcgccccggcgcctggaacgtacggtcgctcagatcgaacacggtacgcgcaggctgcccactgacaatcgcccctgcccgcgtggtgcgcagcgcctccaccatctgccccaccgcatggcgttcctttgccacctgcaagccctggcgcacacccagccccagcacgctggcagccaggctgatcagcaggatcaccaccagcatttccagcagggtgaagccgcgctggagcatggcggccctactcccaattgcccaggtcggcactgtagccttcgccgcccggctggccgtcctggccatagaagatcaggtcgaacgcgccgtgttcgccaggaaagcgataaccgaaggcgtgcccgaacgggtccttgaggtccgacggcttggcatagccaccgggcctgtccaccagctgttgcaggctggtgggcggtgcgccgacgtcgagggcgtagctgtcgatcttcatgctcaggctggccaattgggccttgccggcgccgtacttgcccttgtccacattaccgccgacctggcgcacgacgatggtggcgacgatgcccagcagcacgatcaccgcgagcatttccaacagggtgaaaccgccttggcggcgtggttttttcatggggtcagctcctttatatattgctggtcaggctcgtcagcggcagcatgatcgccagcatgatcaccgccaccagcaccgccatgaccagggtcagggacggcaccagcgcggccagcaggcggtcgatgccgcgcttggcttcgacgtcgaagatgtcggcgaccttgagcaacatgccgtcgagttcgccggcctgttcgccgacttcaatcatttgcacggccagctcgggcagcagcggctggctgccaaacgcactggcgagggtgccgccggcttttaccgattccgccgcacgcccgacctgggcctgcaacgcatggttggtacagacttgccgcgcaatcaccaaggcctgcagcaacgccacgccattgctcagcagcgtgccgagggtacgggccaggcgtgccgcttcgacgcgttgcagcaacgggccgaccacacgaataccgagcagacgccggtcgtagcgctcgcgaaacagcggatcgcgcaggcgtgcggcccccaaccaaacgatcacgctcaacccggccaacagcgccaggccataggcgtcgagaaacgtcccgagggccaggatcacctcggtgatcagcggaatcggcacgcccaggtcctggaagatcggcacgaactgcggcaccacatacgccagcagcaacgccagggaacccagcacgcccaccaccaggaacgccgggtagatcagcgcattgatcacttcgccacgcagcaattggctgcgttccaggtaatcactgagttggcgcaacgtcccttccagcgcgccaccggcctcaccggcccgcaccatgctcaggtacaacgacgagaacgccggaccctcttcttccagcgcggcggacaacggcttgccggccttgacccggtcgcgcaggcgttcgatcaacgcgcgcacctggggtgggccgggctgcttgagcagcaggctcaacgagcgctcaagcggctgaccggcccccagcagcgtcgccaattgctgggtaaacctcaccaacgcctggcccttcaacggcccgcgtgccctgcgcaggccggggccgccggccggttcgatgtgcaacagcagccaaccgcgcttgtgcagggtcgccaccgcagcggtttgatcggtggcctccagcgtaccgttctgcggcgcgccctggctgtccagggcacggtagctgaacaggctcacgcgtcctctccacgggtcacgcgcagcacttcttccagcgaagtaatccccgccagtgcctggcgcaagccttcttcatacaaagtgcgcaaaccggcgcggcgtgcggcctgttccagggtcgaggcgtcggcgtggcgcatcagcaggctgcgcagttcgtcgttcatcaccagcagttcggtgagggcgctgcggccgtgatagtccccgcgatagagcaggatcgggcgttgttcggtgaggcggtccaggccgtgttcggcgatcagttcgggcggcgcttcgaaagcgacacgcgtggccgggtccaggcgccgcaccaggcgctgggcgaggatgccgctgacggtcgaggcaatcaggtagctttccacgcccatgtccagcagccgcgtgatgctggcggcggcgctgttggtgtgcagggtggaaagcactaggtgcccggtgagggacgattggatggcgatgcggcaggtttccaggtcacggatctcgccgatcatgatcacgtccgggtcctggcgcacgatggagcgcagcgccccggcgaagtccaggccgatggcgggcttgacctggatctggttgatgccttcgagctgatactccaccgggtcttccacggtgatgatcttgcgctcggcggtattgagccgcgacagcgcggtgtagagcgtggtggtcttgccggatccggtaggcccggtgaccagcaggatgccgtggggccgcgccagcaggtcgacaaaggcggccaagcgctggccgtcgaagcccaggctgggaaagtcgaactgcacggtttgccggtcgagcaggcgcagcaccaccgactcgccaaaactggtgggcaccgtggacacccgcaggtccagttccttgccctggatacgcaacatgatgcgcccatcctgcggcaaccggcgctcggcgatgtccagccgcgccatgatcttcacccgcgaaatcaccgccgccgacgaactggccggcggcgcttcggcgtcgtgtaacacaccgtcgatgcggtagcgcaccttgagctggtgttcgaaaggttcgatgtgaatatccgaagcacgttgctccaccgcgcgttgcaggatcaggttgaccaggcggatcaccggcgcttccgaggccaggtccttgaggtgttcgatatcgtccagggcaccaccttgttcatcgaggttttcgatcaacgtgcccatggccgaacggccctggccgtagtaacgctcgatcagcgtgtcgacctcagtgcgcgggccgatcgccagccacaccggcacctggcacgcataggccagagcctggaacggataacgcagcgccgggttggcggccagcacgcgcaggccaccctgggtccagcccatgggcgcgacctgatagtgacgcataaagcgttcagtcagggcgggcaaaggatcgagcaacggcggcgcggcgtcggccagcaacagcggcgcaccgagcaacgccgcccaggcacgggccaattcgatatcggaaaccaggcccaggcgggccagcaggcttagcaggtcatccgacggcaagcgccgggcgcgctccaggtccaccgttttcaacccggcatgctgcatcagccacgcacacacctggtcggtgtgcgggatctgcatctggcaggcatcaataggcgctgacgacataaggttgaggtatctagtattgcgaaaaagtatggctatttgaaactacttaaacatgccattagttagccataacccaagcgagaacaagccggggttatcgactggaagttatagcgctagttcctgaagagggggaataaaatagacacaatgaccgagaaccccgtgacagagccttagcagctaatagccactacttcgctagtttcaattagccacttatgcgctttcacgcaattaaatggcagcccaataaactcactggacttacttcaccttcgacgcggagcacactcgcactttcgagtggccgttaaccaggattatcgagcattgaaatgtgggagtgcgttggcatgcctgcgtgagtggtttgggggctgcttcgcagcccaacgcggggcaagcccgctcgccacagcaggcccgctcgccacaggaggccgggccggctacacagaacaaaaaccgtatccacgatgcgaagcgagtcggtcttgatcttgatcaggccttggcccgagtgcttttttcaaccaggcacatcggcgtgccagcgaccggctcttgcatcacctgcacctgcacctcaaatacccgccgcatcaactcggcactgaccacctgcgccggtgcgccatcagcgaccagtttgccgccgtgcatcaccgccaagtgatcggcataccggcaagcctggttgatgtcatgcagcacagtgatcaccgtcttgccctcggcagccagttcgcccatcaggtcgagcaattcgacctgatggctgatatcgagataagtggtaggttcgtcgagcaacaccaccggcgcattctgcgccaacaccatcgccagccaggcacgctggcgctggccgccggacaagtccgccagggcgcgatcagccaacacgtccagttccaggcgctgcatggcttggcttacgtgagcctgatcactgccgctcaagcgcccccacagcgagttatgcgggctgcgaccataggcaaccaactggcgcacgctgacgccttcgggcactggcaacacttgcggcaagaacgcgatctgccgtgccaactcccgggcagacaggctggcataggcctggccatccagggtcaactcgccctgggtcggattgaggatgcgcgcgaaggccttgagcaaggtggacttgccgcagccattggggccgatcaacgcggtgaccttgccggcaggcggtgcgaaggacagaccctgcacgatgcgcgtggcgccatagccgatgtccagctcgcgtgcctggagaatactcatgtcatcaacccttgaaccgtgccagcaaccaaagaaaatacggcgcgccgatcaccgccgtaagcaccccggcggggatttcgctgggcgcaatcagcgtgcgccccagcgtatcggcgagaaccagcagcaacgcgccgatcagcatcgcggccggcagcaggtactggtgatgcccgcccaccagccgccgcgccatgtgcggcgcgaccagcccgataaagccaatcggaccgatcacccccacgcccagactggtgagcaacaccgcgcaggccatcgccgaccaacgcgtacggctcagcgcggtgcccaggctgtgggccgcctcatcgcccaaggcgatcaggttgagcggtttggctaggcacaggcccacggggatcagcaccaggaacggcaacaccagcgccacatgatgccagttgcggctccacaggctgccggtcagcgcaagcaacgcggtgttgatatccaacggatgagaaaggatcagaaactcggtgacgctggacaaagtcaccgcaatcgccactccggacaacgcaaagcgcaccccggaaaaactcacgccggtgttgtacagcgccagcagcaacgcgccgccggccccgcccaggcaagccaccagcggcagccaggcaatcggcaactgcggccagccgatgatcgccacggtcagcgccaacccggcgccttgggtcacgccgaggatctccggcgaggccagcgggttgcggatcacgccctgcacaatcgccccggccaggccgaaggccgcacccgcgaggatcgcgatcaggctgcgcggcaggcggtggttccacacttcgaagtcgagggcgtcgtgggccagcaggcgttccagaacggtgtgcggcgtgagccacagcgtgccggcgctgaggctgaccccggttgccagcagcaacaggccaagcagcagccacaggcgcagtcgtgggcggatcatagggcgcgcctggcaagaaagaggaaaaatggtgcgccgatcaacgcggtgaccacccccgccggcgtttccaccgggaaggccacggcgcggctgagcaggtcggcccccagcacgattaccgcgcccaatgcggcgctcagcgggatcagccagcggtagtcattgcccaggaactgacgcaggatattcggcgcgatcagcccgacaaacccgatcggccccaccgcacacacgctggcgcccaccagcagcaaactggcgacaaacacttgcagacgcaggctggcgatgcccacgcccaacgagcgcgcggcgtcttcgccaaggttgatcaggttcagtcgcggcgcacaccagagtgcccacaggccgccgatcaaggtgcacggccagagcaactgcacctgcgcagcgccgacattggccagggagccggccagccagttgagtacactttgcgcctgggcctcgacgaggatcaccgtgagccgggtcaaggccgcgcacaacgccgccacggccacgccggccaataccaggcggccctgggccgtggtcggcgaccaggcaccgccgaggctgaacaccgtgatccaggccagcgcgccgcccaggcaggtcatcaacagcgcaccaccggcaaagggcagtgcgaccaggccggtggaaaacagcgccagtcccaatgcggcgcccgccgtcacaccaaacagggacggcgacgccagacgattgcgcgtaatgccctgcatcagcgcgccggcgaggcccaggcaggcgccgaccaacgcggcacacacggcccgtggcacgcgcaactgggcgacgatataggccatgttgccgccaacgctgccctggtgcaccaggccattccaggcatccgtcgccgtcagggtgaagggtgaccagctgtacagcgacagccagaacaacacggcacccaacagcagaatgccaatggcggcgaaactgcgttgcacggttattggctcaatacggctttgccgcctttaagaatcgccaacgcgtcctcggcgatctgctccgacgccagcacgccacggttgcgtgcccagctgtcgccatccacttcggccacgtgctgattgcgcacggcgccgagcacttgccacaacggctgcttgctccagctgtcgacgatgctggggcgacggtaatgaccgaccagcaaccaacccgggtcgagggccagcaattgttccaggctgacgaactcggtgggtgcggcattggcgcgtaccgctgggactttcaggccgatggcctcaagcacgctgccggcgtaggagtccgggccatgcacggagaagctgtcctcacgcgccacaccgaacaacacgctggcgccggccgggatctgttgtgcaatggccttaaggttttcacggttcttctggatacgcgcctccatctgcgcactcttgccgagggccttgccgatcagctcggcggatttgaggctgccctggtaatcctcgccacgggacggcaacagcaaggtcggcgcgatgctcgccaggtcgctgtacagcgcctggtggcgattgagatcagcgacgatcaggtcgggcttgagccgggcgatttcctcgatgctcggctgcgaacgcaggcccaccgacttccactggccgatggcctggcgtacgcggggcaacacgcggttggcatcgccatcatcggcggcgccgaccggggtgacgtcaacggcggccaggctgtcgagaaaggaaaactccagcaccaccacgcgcttgggggcatcgggcagatgcacggcgtgctggccatcgttgaggtcgatgggggcggcgctcagcaggctggacgagaacgccaagacacaggcggccagggtggggatggaacgcagcattcgcatgacaaggacctcggcgttaacacaccccagctagacaggccggggaaaacggcgggtactattccatatcggggcggcgtgatcaaaaaacattctcatttatgacctgctcggccatgtggatgctggcttgctggagggggctggcttgtgtggtcactggtttgtgtggtgagcgggcttctgtggtgagcgggcttgccccgcgttgggtggcgaagccgccccaaaacctggcaccgcgttctacctggcacgatgtggtgttcttgttggggctgctgcgcagcccaacgcgggacaagcccgctcaccacaggaagcgcgctcaccacagcaagctcgatgtcagaagtcgacggtggccgacagcaggtaggtgcgcggcgtcgacagggtcagccccggctcgctgtcatccgatgcaccggccgagctccagtagcgtttatcggcgacgttctccacgttcgcccgcagggtgatgtgcttgtcatccaccttgaagccatagcgtgcgccgacgtcgaggcggttccaggcgtcgatttccttgacgttggactggtccaggtactgtgagctggagtagatgccacggctggtcaacgtcaggccttccaggcccggcacgtcccattcggcgccgaggttgacgttgtacttgggcgtcgccggcgcgcggttgccgtcccaggtgccattggtggtgtctttgagtgtgctgtcgatgtacatcaccccacccagcaggcggaagcccttgagtggctcgccgaacacgctcaactccacgccggagttctcacgcttgccattgggcccgaacagccgcgtggtcgcattggtttcataggccggctgcttgatgcgaaacacggcggcggtcaccgcgaaggcaccggcatcgtacttggcgcccacttccacctggcggctgatgaacggcgggaagatctcgtcttcgttcctcgacgtcgacggcgcgatcttgccctggctcaggccttccatgtagttggcgtacaacgacagcttgtcggtggccttgaacaggaggccgcccgacggcgaaagcttttcttcgtcataggcagtgtcgcctttgattccgtcgctccagtcagtcaccttgacccgctgccagcgcgcaccgagggtgagcaacaggcggtcgtcgaaaaagcccagggtgtcggacaaggccacgccactgaatttgttttcggtatagaccttgggatcgaagcgcgtcggccgtgacggcgtcgacgactgcaccgggttgtagagattgctcgacggcgccgtataccgcgcaccgccgttggtgaagtccatgtcgaagtagctggcggccaggttgacctcatggctcaccggcccggtgtggaaccagttgcgcacgccggcggtataggtgcgcacgttttcatcacgggtgaagtcccgcggctgcacgctgaaatcaccggccgcattggtcaccgaaaccgcgtggcgtaggaagtcgtggttgcttttgcgcgcgcccacgccaccgtagagcatcacgttgtcactgaggtcgtactcggcgttgaccgtaccaaaggtgtcattggtgcgagccttgctccacgactgcgcatagttgcggcgcacgtcgttggcactcgggaccggcgcagcggccgccacctgcacgcgctcctggggggcatcggtgtcgcgctcggtgtggccgatatcggtggaaaggcgcaggcgctcgccgcgaaaatccaggcccagcacggccatttcgcggtcgacgctctggtggtcccaggcggtgtcgccggattgcttcacgccgttgaagcgaatgccgtactggttgtcttcgccaaagcgtcggccaatgtccaccgcaccgccggcctggctgtcggaggcccagttgccggtaaacgagttgatgtccttgtcggtggcgcgcttgggcaccacgttgatcccgccgcccacgctgccccgcggcgaaatgccgttgatcaactggctcgggcctttgaggatatcgacgcggtcggccatttccatgtcgatggtgtacgtcggcagcacgccgtacaggccgttgtaggccacgtcactgttgaacaggctgaacccgcgaatggtgaattgctcgtagcgcccaccggccgggttagtggcgcgcaccgaggggtcggcggcgatcaggtcgccgagggtgcgcgcctgctggttcttcaccgcttcctgggtgtaggtggtgatgctgaacggggtctccatgaagtcccgcgtgccgagcatgccctgtgccgtgcggcgcgccacctggccaccggcgtaggtgtcgccgtcgtacaggccggtggtgccgaggatcgacgtgggtgccagctccaggctgctgccctccggcaccggcaccagcatgtaggcctgctcgcccatggcttgcagttgcaggccggagccttgcagcaggcgggcaaagccctcctccacaccgtattcgccggacaggccagtgctgctgcgcccgctgaccagcgccgggtccaccgacaggttgacccctgacaacccggcaaaacgcgtcaacgccgcgctcaggctgccggccggtacctggtaactgcggcgggtgctggtgtcttcggcgtagctgacggcggcgaaaaacgggctggcgctgaggctcagcatcaggctcagtttcagcaaggggcggactgcgggcattggcggaagctctcgatgttgttcacttgcctggaatgacaggcgagatgaaaaaaagggacagccttcagccaattttctttcttaccatactgcgatcgttgaatccgtccttggctccgttccgccgcacaatacaccactgaccggatcacgcaggatgatctggccgcgcccatagtcggtgaggtcgctggcgatctgcacctgatgcccgcgtcgcgccagggcattggccaggtcacgggaggcaccctgttcgatgccgaccttcatgtcgcccagccattgccagcgcggcgcgtccagggccgcttgcgggttgaggccgaagtccaccaggttcatcaccatctgcacatgaccctggggctgcatgtagccgcccatcacgccgaatgggccgagggcctgtccgtcctgggtgaggaagccggggatgatggtgtggaaggttttcttgcccggtgccagacagttggcgtggctcggatcgaggctgaattcctgcccacggttctgcagggcgatgccgctgtcgggcagcaccacaccggagccgaagccgtggtagttgctctggatgaacgagaccatattgccctcggcatccgccgtggccaggtacaccgtgccgctggcatgggggtcgccgggtttgggcggttgcgcctgttcgccgatctgcccacggcggcgggtgctgtaggcatcgctgagcaggtcggcgacggccacgcgcatgtgcagcgggtcggtgatgtagtgcaggccgtcgctgtaggcgagtttcattgcttccaactggcggtgccaggtctgctggctgtcgcggtgatcgaagctgaagccttcgaggattttcagcgccatcagcgccaccaggccctggccgctgggcgggatttcccagacgtccacaccccggtagttgatgtggatcgggtccacccattgggcgcgataatcctgcaggtcgctggcgcgcaggtagccgccactggccttggaatgggcatccaggcgttcggccagggcgccgcgatacaggctttcgcaacgggtcgcggcgagttcttccaaggtgcgcgcctgggccgggttgcggaatatctcaccggccagtggcgcgcggccgtcgatcaggaacgtgtcgaaccaggcgtccagggctgagtcgcgatgggggctgaattcgtccagcgcgacctgccatagctgggcgatcaccggcgacagcgggaagccgtcacgcgccaggctgatagcgggttgcagcaactcggcaaacggcaacttgccgaagcgctcggacagctcggcccaggccgatgggcagccgggcacggtgaccggcgtccagccatacagcggcatccggtcgtgccccgccgccttgaccgcctcgatactcaaggccgccggcgcgtggccgttgccattcaggccgtgcaaccgacccttgcaccagaccagcgcgaacgcatcgccgcccaggccacagccggtgggctctaccactgtgagcgcggccgccgtggcaatcgcggcgtcgatggcgttgccgccctgttgcatcatctggataccggcctgggccgccaggggctgggacgccgcaaccatgccgcgacgggcaaatacgctttggcgctgtgagggataggggtactcgtgagcagaaaatttcaacatggcaaaggctcttccacacaaggtttcgggtcataacacacggctgagaaacgctcgggtccgcgggtggctggggtggctgaagatctgttccggcggcccttgctcgatgagttcgccctggtcgagcaccaccacgcggtcggcgacttcacgggcaaagcccatttcgtgggtgaccaccaccatggtcatgccctcctcggccagctccttcatcacctgcagcacctcaccgacggtttccgggtcgagggcgctggtgggctcgtcgaacagcatggcctggggtttcatcgccagggcgcgggcaatcgccacgcgctgctgctggccgccggaaagcatcgacgggtagtggccggccttgtccgccaggccgacccgcgccagcaatccacgggcttgctccagggcttcggcgcgcggtgtgccaagcacctggatcggcgcttcgatgatgttttccagcgcggtcatgtgcgggaacaggttgaaacgctggaacaccatgccgatgtcgcggcgctgacgcgcgatgttgcgctccgaatcacgcaccaggctgccgtcgctgcgctcgcgatagcccatggcacgaccgttgacgcggatgcgcccgccctggatgtcttccagcaggttgatgcagcggataaaggtggtcttgcccgagccggaggcgccgatcagcaccaccacttcgccgcgccgcacttgcagggagatgcccttgaggatctgcagggtgccgaacgacttgtggatgtccagcgcctcgatgatcagttcttcactctggtgcgccatggttatcgtcccctcagcagtttcaaggtgctgcgcccgaacatgcggctggacgccggtggcggcgcggatggccggtcggactggccgaagcgcgcctccagccagcgctggaaaaagccccacagcgtggtaagcatcaagaagtaaatcgccacgaccaggtacaactcgaacacgcggaacgtcgccgaggtgaccatctgcgtgctgagcagcaactcctgcacgccgatcacgctgaccagggtggtgttcttgagcatcacgttgaactcattgcccagcggcggcacgatcacgcgaaacgcctggggcagcacgatgcgccgcatcagcttggcaaagcccatgcccagggaacgcccggcttcgtattggcccttgtccaccgcgccgatgccggcgcggatgatctcggccatgtatgcgccttcgttcaagcccagcgcgatgatcgccgcctgaatattgccggggatgaccaggccgaacagcgcgatatcctcgaagcggaaaatcccgcccgctgccaacgcggtgtacaggaatacgatctgcaccagcagcggcgtaccgcgcatcagccacacataaaaacgtaccggcaagtgcaacagcgggttcttcgacaagcgcagcagcgccgccgccaaccccagcacacagcccagcagcatcgccgacaccgcgatcaggcaggtcagccacagcccggtgaggtacaccccgctcggctgcaacaggtactgccagaacacatcccaattgaaattcatcgccggtgtgcctcagtcgagtgtgtcgctgctgacatgccacttgttcagcaactggacgtagctgccgtcgctgcgcatgtcgctgatcacttgctgcacggcggcgctgagttgcggatcatctttgcgcatgcccagaccggtgaggatgcggctgaacgctggcacgccttcctggaacagctccggggccatcgccgcgtaataaccggcggtttccacggtggtgccgtaggcatcaacctggctgatgcgcagggcctggaaggcgtcggtatcggtgttgtacaccaccagtttcatcggtgatttgccggccttggccaggctgtcgttctgcgcgtccagcagggtcttgatggtagagccgttgagcaccgcgaccttgtgcccggagagatcatccaggctcttgatgcccttggggttgcccttgggcaccaccaccgactggctggaatacatatagttgacgatgtcgatcacctggcgccgctcgggtttgtcgaacagttggtcgacgatcatgtcgcactgctgggcgagcagcgccggcaccaggccagagaacggaatcacccgccactgcacctgtttgtcgcccaggcgcttggcaatttcgaggcccagctcgacggtgagcccgcggggtttctgtgcttcatcgaaggacaccaggggcggtgaatccatccccgagcagtaggtgagtttgtcgacgttcttcagacgctccggcacctggggcgcggcgacggcccattgggtacagaggccgagggagacagccaccagcaaggcgcggtgtttatgcatgaccagacactccagttcgttgattaacggggcaggactcaacgtcaacacacagcaggtgtttcttattgttgttgttcgctttgcaggaactggatcagcgccggcacggtgccttcgatatgttcgcgcaccacggcttcggcgcgggcggcgtcaccggcacggatcgcgtcgagaatcaccgcgtgttcctggcgggcactgagaggtttttcgccgtgttgcaaccacaggcgcatcggcgcttcgaccagtgagtacagcgccgagatctgcttcatcaggcgcgggcggccactaaggctgcacaggtattcgtggaaggcacggtggcgactgacccaggcggcgctgtcatcacggtagtcgtccatcgcgtcgagcaagcgctccagcgcggccaactggcgctcgccgatgcgccccaccgctacgcgcaccgccaggccttcgagggcgctgcgcatttcgaacacttcgtgcagttcatcgatatccaggccgctgacgatggcaccgcgattgggccgcaagttcaccaggccctgggcgtccaggcggcgaaaggcttcgcgcaccggcatgcggctcatgccgatctcgctggcgatgtcttcggcgatcagacggtcgcctttgcggtaacgaccgccgcaaatggcatcgagcaggaagttgtaggcctcctcctcggcagtgaggggctggcggtcaacgtaagcgggggcaaattgcatcggcagcaccttttgaatttttgtatccaattatccatggatacgaaaaagcaggatgtgtgccaagtgaagtcatgatgagccaagcgcttgattcgaatgaaatagacccgttcgtcaccggaaaacatgaagcgatcgtgcagaagcccgctacctaaccgctcagaaaacgccccatcagtgggcagaagtaacaagcgagggcacgcccgggaatgcctcactcgcagacggcagctcactcatgcgtatgaccgccagtggacggccacacgcggccgctcactgtggccattgctcaagcagtatcgagacgaatttttccgccgcaggcgaaagcgatgagcctcggcggtagaccaagcccaaagaacggttaaccactggctcgatcaacgggacgctgaccaaggtgggatgatcatcagccggcatggccaggcttggcatcgccgaaacccccaggccggcctccaccaggcccaatgaagtcgaaaggtgctggacttcatagaaccattgcggccgccaactcaaacccgatagagcgtggtcgagcagcatgcggttgccgctcaaacgccctaccccgataaggcggtaatcgctcaattcagaccaggtgaccgaactgcgacctgccagctcgtgatcacgccggcacgccaatacaaagggctcactgaccaatggcacgaactcaatgtccggatgctgcccactcatcatgttgataccgaagtcggcttccccgcgcagtaccgcttcaaggccctcattcgcactcaaatccagcagacgtatgcggatttttggatagcgctcgttgtacagacggatcactgaaggcaggaaatagaacgcggcggtagggatacacgccagggttacacgaccgatctggcgttcggccagttcacggatattaagaatcgactcgtcgaagtcatccagcaaccggcgcgccttgggaagaaagtcacgcccgacgctggtaaggctgactttgcgggtggtgcgatccagcaacgccgtgcccagcccctcttccagtttttttatccgccggctgagtgcaggttgagacagatgcaaagcatcggccgcttcgtgaaagctacccaattcggcgattttcacgaaagatcggatgtcgtttagctcatagtccatgtccagtctcgtcagccaaggaaatagggaagtcgtttagcgcacttttatcattcgccaaacgcaataataacgtcaatttttgcattggaaacatttttcaaagcttgagactcttgctcccagagcatcaattacctcgattgatcaacaagagtcagtattatgcaaagaatcccctgtgtgctgatgcgcggtggtacctccaaaggtccggtttttctcgactgggatttgccgtcgtccatcgaggcccgcgacgaactgctactcaacctgatgggctccggtcatgaactggagatcgacggaatcggcggtggcagcccgcaaaccagcaaggttgcgattgtcagcccttcactgcacccggatgcggacgttgattacttgtttgtccaggtgatggtttcgcagcgcagagtcgacagcgcacctaattgcggcaacatgctgtgtgcggttggcccgttcgccatcgaacagggcctggtcaaagccacccccggacgcacccgtgtgcgcattcgcaacgtcaacaccgggaccttcatccattccgaggtgtacacaccggatggcaaagtcagttatgagggcgataccgccattgatggtgtgcccggcaccgcggcgccggtgcaactgaccttcctggatgcagccggcagcaagacgggcaaactctttcccaccggcaacacgcaggacgtcattgatggcattgcggtgacctgtatcgacatggccatgcccatggtgctcgtcgaagccagtcaactgggcaagcgtggcgatgagagcccagcggaactggacgccgataaagaattcctgcgacgccttgagacgctgcggctgaaggccggcctggccatgggcctgggcgatgtcagcggcaaagtgattcccaagccggtgctggtctcgcccgcgaaagctggcggtacgattcaggttcgctatttcatgccgcacaactgccaccgcgcgctcgccattaccggctcgattggtctggccaccgcgtgcgtgatagaaggcagcatcgtcgcgcagatgcttggcggggtcagcacgccgcgtcgtgaagcggtgcgtatcgaacacccaagcggcgggattgatgtcgtattgtcctacaccggccgcaatggtgagacaattcaagcgtccgtcgtacgcaccgcgcgcaggctgttctccggttacgtctacgccactgagtcacagcgcctcgccggataattccggcggtcgttggcatttttgcatccgcacaattctaaaaatgggtgatgccatgaaagttgttaaatcgctctacttccagatcctctgcgccgtggtgctgggcattgtggttgggcatttctgggctcagcaggccatcgcactcaaaccactgggtgatgcgttcatcaagctcatcaagatgatgattgcccccgtggtgttctgcaccatcgtcaccggcatcgccggaatgagcgacaaacgctcgctcggacgcctgctcagcaagaccatgctgctgttttttggccttacggtgatcagcctggtcattggcctggtggcggtatacgtgttccagccgggcgtcggcatgaacattgatcccacccaactgagcaccaaaggcttggcccagtacaccgagtcggcggcaaagcttggggttgtggagttcttcatgcacatcatccccgaaaccttcgtgggtgccttcagtaagggggaagtgctgccggtgctctttattgcggtgttatccgggtttgccttgtcatccctgggcgagcgtggcaagccggtactcgacgtactcgaagccgcttcgcagatggtcttcaagatcttcgcgtacctgatgcgttttgccccggtcggagccttcggcgccctggcgttcaccgtgggtcagtacggcatcacttcgctgggttcgctggcgaagttgatcatgaccttgtacatcgcctgcggcttcttcgtgttcgtgatcctgggcagcatttgccgtagcaacggcttcagcctgtggaaactgttgcgctacttccgtgaagaattcctggtggtgctgggcacgtcctccacggaaccggtcatgccacgcatgctggaaaaactcgaagcgctgggctgcaagaaaggcgtcgtgggcctggtactccccaccggctactcgttcaacctggacggtacggccatttacctgtcgttggcggcgattttcattgcccaggcctgcaacattgacttgagcctgacgcaaatcatcaccatgctggcgatcatgctgttgtcctccaaaggtgccgccggcgtgacgggcagcgggttcgtcgcgctcgcttcgaccttgacggtcattcacgacatcccgttggccggcctggcgctgctgatcggggttgaccgcttcatgtccgaggcgcgcgccctgaccagcctggccagcaacgccgtcgcgacggtagtgatttccctatcggaaaatgcctgccatcgcgaaacgctgcaccggatgctcgacgcaaaaccctctgcgacgccggtagaagcctgggaagacctgaaagtccccaagcgcgtttaacaatcaccgggcaacgcccctccctgacttgacccctcctccgccaggcgcctttggccgcccggcggatcagggcgcgtgcgcctcggcgtcagccactattacgataacaacaagagaatcgtcctatgctcgctttccttggcctggccatggtggtcgtatttaccgtcctcatcatgacgaagcgtttgtcgccaatcgtcgcgctcaccgttgtacctatcgtcttcgcggtgattggcggtttcggtggcaccaccggcaagatgatgctcgacggcctgaaaatggtcgcaccgtctgccgcactgctgttgttcgcgatcctgttctttggcctgatgatcgacgcaggcttgttcgacccgctgatccgcaagatcctcaagcgggtcaatggcgacccgatgaagatcgcggtcggcactgccctgctgtccttgctggtcgcactcgacggcgacggcaccacgacctacatgatcacctgcgcagcgatgctgccgctgtataagcgcatcggcatgaacccgatgatcctggcgaccatttccatgctgtcgctgagcatcatgagcggcatgaccccctggggcggccccgcgacacgggctattgccgcgctgggcctggatgccggcgaatacttcgtgccgttgctgccgaccatgatcggcggcgccctgtgggtgatcttcaccgccttcctgctgggacgtgccgagcgcaagcggatcggcaatgtccaactgcagagcggtggcggcgattgctacatcaacgcgattcttgaggacaccccccacaagcgtccgaaactggcctacgtcaatctggtgctggtcattgcggtgatggcggccctggtgatggggttgatgcactccgcgatcctgttcctgatcggctttgtgctcgcgctgatgatcaactacccgcaattggacattcagaaagaacgcatcctggcgcactcgggtaacgccatgaccgtggtgttgctggtattcgccgccgggatctttgccgggattttttccggcacaaagatggtggacgccctggcacagaccctcgtcgactggatcccgccatcctggggccacctgtttccattggtggtggcgatcaccagcatgccgctgacgttcgtgctgtccaatgacgcctactattttggcgtggtgccgatcctggccaatgccgccgccgcgtatggcatcgatccggttgaaattgcgcgcgcctcgatcctggggcaacccgtccacctcatgagcccgctagtggcctcgaccctgttgctggtgggcatggtcgatcgcgatatcggcgacttccagaaggccaccgtcaaatgggcagtgctgacctcgctggtcgtcaccgcgctggccttgttgaccggggccatcagcctgttcacctgatccacccacaacctctgctgtctttcagcgcgcctcgctcacggggcgcgtgtcgccctgcaccccaaataacaacaaagagtcatttgccatgaaccctatgtatgcccgtcgggctttgttttgcgcgttaggcctggtacccgtcgcaggagccaacgccgaaggttttattgatgacagcaaactcaagctgcaactgcgcaacgtgtatttcaacgagaactttcgcgacgagcacggcttgagtgcgcgagccgccagaacggcaaaaagcgagcgtaccgagtgggcccagggatttctgctggactatcagtccggatttacgccgggcaccctcggctttggcgtggacgccctggggctgtatggcgtgaagctcgattcagggcgcggccgcagtggcaccgggctcatgccggtgcacgatgacgggcgagcggcccacgagttcgccagcgccggcgaaaccgcaaaggccaggttcgccaaaaccacggtcaagtacggcaccttgctgcccaagacgccggtgctgatttacaacgatgcacgcttgttgccccagacctaccagggcacccaggtcagcagcaccgacatcgacaacctgaccgtcaccggcgggcacctggaccgtttcaaactacgcgactccaccaacagcgtgccgatcgtgcccgacggctacagcggggaaaaatcgggagatttcaactacgccggggctgagtacaaatggggcaaaaaccttcgcttgagttatttctacggggaactcgagaacttctaccgacagaactttgccggcatccagcacgacctgccactggccggtggtgtgctgaccagcgacctgcgctacttcaacagtgttgatagcggcgctggctacgcgggcaaaatcgacaatgacatgttcagcggccagttgtcctacgtgatcgcaggccataccgtcggagggggctaccagacccttcgcggagatgccggtctgccctacatcagcggcgccaccgtctactcattcagcaacgccggtatcggcaaattcatcgaggaggacgagaagacctggatgctcaactacggctacaacttcgccgccgtcggcgtacccggcctgaccttctcggcacgctacctgagcggcaatgacggcaagtccacgaccacggtcaaggaatgggagcgtgataccgagctggcctacgtggtgcaggccggcacgttcaaggggctgggggtgcgcatgcgcaactacgtctatcgctctgaattctcccggggccgcgatagcaaccgcctctacctcacctatgacattgccctctggtaagtcgacgatcgcggcccttgcggccgctttccttcaggttaaggtgaggacatcccaacatgctgttcaagaacaaatactgattctgccggtgaccctgcccgttcatggcctgctcaactggagcacttacctgttcaaggacaaggcattgtgatatcactgcttccaaggccgcggcctgaagcggcggttctggagagcggtcgatgagggtatttggcctggcaatactcatcccaacatgcgccgtcagctatctcatctgcacgggtgacacagcaatagcgctggcggccagcttcttgttctatctcagtgcggtcctgctctacatgtatccgtcggtttgcgtagccctcctccaccctgatcctccccgtgccttactcacgaaaaatctccttgcgggctggaccggcatcggctggttcaaggcctatcgttgggcccttgccgaactgcgccaacacgaagcaaatgcactcaagcgcggagatagaaagtgatggcctattggcacttcttcaaaaggcgcaggtcaatcgtgcatcactacccacgttagtacgtcatcatgcacagctggaagaaaatatcgctgaccgagggtctggagcggagcctgccggggcacaaggtcgattgcgttctgatcaatggctggactgctaccgtctttgtcaggtcgccagaaaccgaatcaatgttttgtacaacgggtatcaacctggccaagcttgcagaccgctcgagcgtgcagcagcttgcagacgagataacatttgagattgatatgtccaggaccaggagcgccggctagcgctccccctgcttgatcattcaatttcgctgcaacaaggtgttaggcgcgacgccgaacgctttgcggaacgcatggctgaaatgggagaagtcagaaaacccgaagtccagcgcggcctgcgagatactgcgcacctggccgcgctcgatcgcttcacggctggcattcaggcgttccctccaaatctcggcggcgggggttttctggtaccgcgcgaacgcgcgcgtgacggtgcgggtggacacattgtgggcttgagcgatgacctcaatcgacaggtccggctcggccagatgccgttggatgtactgcatgatgcggccgtaaaggtccagttcctggtgagtggccttcaggtcctggagttccaggctgatcaccagaaggtcgagcaacgcctctgaatagcgactggagatgccctgatcctgcaaggatgccggggtaatcgctgcttggcgcagcatttcacgcaagggaatcacgccgggccgccgatcatcgagaaccatcgcggtgtgctccgcaatacgcggcaggcgttcagtcagcaatgcccgcggaatacgcaccaggtgattttcggtaccaccgaggctgaatcggaacggttgcgttgcgtcataaagaaacaaattgccagtggccaggctggcttttcttccgctctgttcaatttgcccatgaccgttccgggcgaaccccagccataaatcgtcggccggaccgctacgcagatgttgcgcggaacgctcccagtaatgcaggggcgatgacagtgaacagatgtccagacggcctaaggtattgaccgcaagcacaccatcgaaactgctctgggacaagggtttgctatcggccgccaggcaatggcggcagaccacttctttccagtaatcaaagcgacgtggtgcagcaacagcaagggtcgaatactgagtgcttggattcatggcactgacctcggtacggcaatacagttagagctcgaaaaggtgttaccggcttttcagcgctagcaattaataggccagacacattgacggtcgccctcacgtactcatagcgacttcctgcgcccgagcgtccccaataagaggcaaacaggcctgggctttcgacacgggcgcaccaacgccgatcaccggaggggtcccccccggggttgtcttttccaaccaaacggttgtctcgacgaaccaagcggcctctcgccgtcacgcctaatttccacctcacagcagctcaacccccgctgatgaggcacgccatgcatcgacactgttcacaccctttggctgatgcctcctggctcctgcacaggcgcgacctcgtgcctgaagagtcggcttattggttgatcgagtggggggccatgaagctgctgcgccgacgacagaccgccaagcgcgacccgtcgcccaagcactgatgcccacccgtaggcctgaacgaaaataacgaggagctcaacatggaatctgcaatcgacacacatctcagatgcccacgcaccctgtcgcgccgcgtgcccgacgagtaccagccgccctttgccatgtgggttgcacgcgccgacgagcaattggaacaggtggtgatggcctacctcggcgtgcagtaccgaggggaagcgcaacgcgaagccgcgctccaggccatgcgtcacatcgtcggcagcttcagcctggccgatggcccgcagacccatgacgtgacccaccacaccgacaacagcggctttgataacttgatcgtggtcggctactggaaagacccggctgctcactgccgctggttgcgctgtgctgcggtcaacgactggtgggcctcccaggatcgcctcaatgacgggctaggctattttcgtgaaatcagcgcaccgcgcgccgagcagttcgagacactctacgccttccaggacaatctacctggtgtcggcgccgtcatggacaagaccagtggcgaaatcgaagagcacggttactggggctcgatgcgcgaccgctttgcgatctcccagaccgactggatgaagcccacgagtgagctgcaagtgatcagcggtgatcctgctaggggcggccgggtggtggtgctggggcatgacaacctcacgctgattcgttccggccaggactgggcggacgccgaggcggatgaacgctcgctgtacctcgacgaaattctaccgacgttgcaggacggcatggacttcctgcgtgacaacggccagccgttgggctgctacagcaaccggttcgtgcgcaatatcgacctggacggcaattttctcgacatcagctacaacatcggacactggcgctcggtggaaaaactcgagcgctgggccgaatcccacccgacccacctgcgtattttcgtgacgttcttccgcgtggccgccggtttgaaaaagttgcggctgtaccacgaagtgtcagtgtcagacgccaacagccagatcttcgagtacatcaactgccatgcgcacaccggaatgctgcgcgatgccgctgccgcacaaggagaacggccatgaaattgagtcgagtcgtgttggtgctggggatgttgccgtttgccaaaagccaggccctcgaggtcgcgccgggggatttcgaaccgctgcccgccggggccgatgcggtgttgttttactaccagcacgccaaccggtccgagctgtatcagaacggccatcgaacctccgacaacgccaagctcagctccgacgtaggcatcctgcgttacatccatgccataggccttggcgaaaacctttcatgggaaccgcagatcttgctgccgttcggctacatgaacgcctctggcgacgtcggcgcgctgggtgatgcacatggcctgggtgacccgattctcaccgccccgctcaagtggacactccccaccgccaacaaggatgtgtttgccctggccccctacctgtacatccccgtgggcagctacgacaaaaacgacgccttgaacctgggcgagaaccgctggcgggcaacgttacaagcggcctatatccaccacttctcagcgcagtgggcattggacaccgtcgccgacgtgtcctgggtttcgaccaatcacgactacggtaccagcagcgcgaaactcgaagaaaacacgcgctacgagtaccaggccgccgtgcgctacaactggaccccaagcaccacgttcgccctcggtggaggctatgtcaccggggccgcaaccagcatcgacggcgttgaccagcacgatggcgtgtcgacgtcctacgcacgtttcacagtcacgcactttattgatcccacattgcaggtacaggcgcagctcggcagggatatcgaggtggagcaaggcttcaaggaaggcgcgcgcctgaatctgcgcgtcttgaaagtgttctgaatgccgctgtccttttcagccaagtgcgtgtcctgctcaaccatgcgaatacggtgatagacgcctaatttggtgtacatcaccacccggactgaatcgataaaaagacaggaaaatcatggccattactcgtcccacgctggatcagctgttagccatcgcggcccagttgaacatgcgactgacccaggaacaggcagcgtcctatctggatctgatgcaaccaagtttcgatgcatacgatctggtcgacgaactgtgtgatttcgttccgccgatacgttacgagcgcagctcaggctatcgcccctcggccaaggaaaacccgctcaacgcctggtactaccggactgaagtgaatggcgcccgtggcggcctgctggccggtaaaaccgtcgcgctcaaagacaacatcgccctggccggcgtcccgatgatgaacggcgccgcaccgctggaaggttttgtaccgggtttcgatgccaccgtggtcacacgtctgctcgatgccggcgcgaccatcctcggcaaagccacttgcgaacactactgcctgtcgggcggcagccatacctctgacccagccccggtacacaacccccatcgtcacgggtatgccgccggcgggtcgtcatcgggcagcgcggccttggtcgccgccggtgaagtcaacatcgccgtgggcggcgatcaaggcggctccatccgcatcccgtcggccttctgcggcacctatggcatgaaaccgacccatggcctggtgccctacaccggcatcatggcgattgaagcgacgattgatcatgtcggtcccatcaccgccaacgtgcacgacaacgcgctgatgctgcaggccatggccggttccgatggcctcgacccacgccaggcggcgcctcaggtcgatgactattgcagttatctggcgcggggggtgagcgggctcaggatcggtgtgttgcaggaggggttcgcgctggccaatcaggatccgcgcgtggcggacaaggtgcgcgacgctgtcgcccgtctcgaggcgttgggcgcccatgtcgagacagtgtccgttcccgaacacaacctggcaggttcgttgtggcaccccatcggttgtgaaggcctgaccatgcagatgatgcatggcaacggcgcaggctttaactggaaaggcttgtatgacgtcggcctgctggacaaacaggccggctggcgcgaacaggcggaccaattatccgcgtcgctcaagctgtgcatgttcgtcggccagtacggcctgacccactacaacgggcggtattacgccaaggcacagaacctcgcccgctttgcccggcaaggctatgacaaggccttgcagagctatgacttgctggtgatgccgaccacgcccatcactgcccagccccacccgccggcgggctgcgcgatcactgaatacgtggcccgcgccctggaaatgatcggcaataccgcgccacaagacatcaccgggcatccggccatgtcgattccctgcggcctggtggacgggctgcccgtcgggttgatgctggtcgccaggcactacgccgaaggcacgatctaccaggccgcggcggcgttcgaagccgcggtggactggcgcacgctctgagcgcccaacctgaaaacaataagaaagaccggcacgtttcaaccactccacaaccgcgatgactgacaggagataccccatgagtccatctacttccacgcctgcgagcacttcaacccccggtgaacgggcctgggcattgttccaggtcctcaagagcaaggacctgattccagagggctacgtcgagcaactcacgcaattgatggagcacggctggagcccggagaacggcgcccgggtggtcgccaaggcctgggtcgatccgcagttccgggcgctgttgctcaaggacggcaccgctgcatgtgcccagttcggctataccggcccgcagggcgaatacatcgtcgcgctggaagacacgccacaggtaaaaaacgtgattgtctgcagcctgtgctcatgcaccaactggccggtgctcggcctgccacccgagtggtacaagggcttcgagtttcgtgcccgcctggtccgggaggggcgcaccgtgctacgcgaactggggacggagttgccaaccgacgtggcggtcaaggtctgggataccagcgccgaaacccgctacctggtgttgccgctaaggcctgaaggttccgaacacatgagtgaggagcagcttcaggcactcgtgaccaaagacgtgctgatcggcgtcgccctgccctgcgttggctgagaaaaaccacgcatcatcgttcaactcccggagtttctattatggatggctttcacgatctcggcggtttccaaggctttggcaaagtccctcacaccatcaatagcctggactacaaacaggtattcaagcaggactgggagcacctggcgtacagcttgatgttcgtcggggccgatcatttgaaaaagttcagcgtggacgaagtgcgtcatgccgtcgaacgcctggacgtacgccaacatgtcggcacccagtactacgaacgctatgtcatcgcaaccgccaccttgctggtcgaaacgggcgtcatcacccaggcggagctcgaccaggctttgggctctcacttcaagctggcaaatccggcacaggcgggagggcgtgcggcgatcaccggtcgcgctccgtttgaggtcggcgaccgcgtggtcgtgcgcgacgagtacgtggccgggcatatccgcatgccggcctatgtgcgcggcaagcaaggcgtggtgttgcaccgcactgcggaaaaatggccgttcccggacgcgatcggccatggcgataccagcgcggcgcatcagccgacctaccatgtggagtttgcggtgaaagacctgtggggcgatgcagcagatgacggcttcgtggtggtcgatctgttcgaaagctacctggaccacgtcgatgcccctcgagcggtgaacgtatgatggacggcacccaggcgggccgactgccggtgacggtgctttccggcttcctcggtgccggcaagaccacgctgctcaaccatatcctgcgcaatcgcgaaggcctgagggtggcggtcatcgtcaatgatatgagcgacgtcaatatcgatgccgccgaggtgcagcgcgacgtgtcgctgcaccgtggtcgcgatgagctgatcgaaatgagcaacggctgcatctgctgcacgctacgcgccgatctgctcgaacagatcagtgccctggcgcgtcagcagcgtttcgattacctgctcatcgaatccacgggcatctcggagccaatgccggtcgccgagacgttcgccttccttgacgctgaaggcttcagcctcagcgaactggcacggctcgacaccctggtgacggtggtcgatggcagccgttttcaggcgttgctcgcgtcaccggacaccgtggcccgcgacgatacacaggagaacacctctgcacgccctttggcggacctgctgatcgagcaggtggagtacgccaacgtcattctcgtcaacaaacgggacctgatcgacgagccgggttatcaggccgtgcaggcggtcctcgcaggccttaacccgacggcgcggatcataccgatggcccacggccaggttgagttgacccgcctcctcgacacctatctgtttgacttgcccagccttgcggcgtcgccgggctggatgaggaaaatggaggttgaagacgctccggcctccgagtcggacacctatggcgtgacgtcctgggtgtaccgcgaacgcgcgcccttccacccacaacgcttgctcgatttcctccaacagccctggagcaacggacgcctgttacgcagcaaaggttatttctggctggccagccggcacttggaaaccggcctgctagcgcaaagcggcgcgcagttccagtgggactatgttgggcactggtggaacttcatcgagcagtcgcagtggccgcgggatgaataccggttgcagagcatcatggccaagtgggacagcatcgtcggcgactgtcggcaggagtgggtgttcatcggccaggatctcgatacccacgcgttgcagcgtgagctcgacaactgcctgctcagtgccgaagaaatcgccgccggaccgtcggcctggcgagccctgccgggggccgcggcctttgatgcacaggccctgtcggctcccaggcaggctgaatccatttgacgaggtagaggtgttccatgctctttttcagccgaacccaccgctgggtactgacgccgctcgccgacaggctggagcagcctgaccaggcaagcacgccgctgtcgtcgaataacccgatattgcgccgcatcctggccggcgtagaccaactgctgcaggagcggcgaaccctgaaggaccaaacacgcgcattgggcctggaagtcgcccgattggatcagcgcctggccggccgcgacacacaattgcgccaactggaagcgcacttgaccctgatcacccagggcgccggtgaactgttttgggcgctggaactcgatggaaccactgcccctgcgccggactgtgcgctgcaatggatggggtcggcgtcgatccagccccagggtgttgatcaactgggccgttggagtgaacagttgcacccggctgaccagcaagcgcatcgggaggcgcttacccggcatctggccgatcgcagcgggcgtacaccctttgcgttggacgtgcggataaagcctgcaaccggcgacgactatcgctggtgcaggatcagcggtgagtcgcggcgtgatgcgcagggcctcgcggtcgccatcggtggcagcgtacgtgacattcatgaacaacgcctgcacaacgaaacgctcgaactggcggccacccgtttcgatatttcccgggagatgctgcatgacgggctctgggacatcgaggtggtagcgggcgacccggcgaacccgaaaaacaccatttggtggtcgtcgcaaatgcgccggctgctggggtgcagcacggttgaggagttccccaacaccctggaaagctggacctcacgcctgcatcccgacgatagcgctcgggccatcgcagcctttgtcgcccatgtggacgaccgcagcggccggaccccatttgacgtggactatcgactcaaacacaaaaacggcacctaccgctggtttcgcggccgcgggcaaacacgtcgcgccccggacggctccccgcagagggtggtgggcgccattaccgatatccatgcccaccatgaagaaagtgcgatgcgcgaaacgcaggcgcaacagcatcgggtgatgcaggagaccctcagcaagctgacgcagattgtcgccaccatccagggcattgccagccagaccaacctgctggcgttgaatgccgccatcgaagcggctcgcgccggcgaggccgggcgcgggttcgcggtggtcgccgatgaagtgcgcaagctggccacccgcaccagccaggcgacccaacaggcggccgagatgatagacggctaaccacgtgcccccgcgctgcgggcgtgggcaacgcacatattccaacaataacaatcaggtacgttatgcgcgattacaactcagcagtgagctccttcgattttttacgcttggccgcgcaggatttacagggcgagctgaatgccttgaatgcctgcgtcgaatgctgcgaccgacacgccgacgtaaatgccgtggcgttgtattgcgaaacgcgggatggccgcgccacgcactaccgtttcagcgaactgcaagcccacgctgcgcgcttcggcaactttctgcgggaacagggggtcaagcccggagaccgtgtcgcgggcctgatgccacgcacggttgaactgttgatcgccattttgggcacctggcgtatcggcgcagtctaccagccgctctttaccgcgttcggtccaaaggcgatcgagcagcgattgggctgctccaaggcacgctggatcgtgaccgacgtgcacaaccgttccaagctggacgacatccccgactgcccacgcatcctggtgaccggcgatcatgcatggaccccaggcgattacgatttctggagcgcgctggatcgtcaacacgccgagtgcgcgcccgcgttgctggatgccagcgcgccttttttgctgatgtgcacctcaggcaccaccgggccggccaagccgctggaagtgcctttaagcgctctcctggccttcaagggttatatgcgtgatgccatcgacttgcgtgaggaagacccgttctggaacctcgccgaccctggctgggcgtacggcctgtattacgcggtgaccggtccattggcatgcggccatgccacattgttctatgacgggccgttttcggtggagagtacctgccggatcatcgcgaaatacggaatccgcaacctggccggctcaccgacggcctatcgcctgctgatcgcagcaggggacgcgttcgccgacgccgtgcgtggtcacctgcgtatcgtcagcagcgccggcgagccgcttaacccgcaagtcatccgctggtttgccgaacagctcggcgtggtcatccacgaccattatggccagaccgaaatcggcatggtgctgtgcaatcaccatgggctagaccacccgatacgtgagggatcggccggttatgcgatgccgggataccgcattgtcgtgctggatgacgcccaccgggaattgccgactggccagccaggcgtgctggcggtggaccgcgaacgttcgccgctgtgctggttcaagggctacttcgcgatgccgaccaaagcctttatcagcggctattacttgagcggcgatattgtggagttgaatgacgatggcagtatcagcttcgtcggccgtaacgacgacgtgatcaccacctcgggctatcgcgtcggacctttcgatgtcgagagcgcgctgatcgaacacccggcggtggtcgaggccgccgtggtcggcaaacccgacccgcagcgcaccgagctgatcaaggcatttatcgtattgaatggccagtactcgcccagcgccgaattggcggaagtcctgcgcctgcacgtgcgagagcgcctggctgcacacgcttacccgcgggaaatcgagttcgtcgaacaactacccaagacgccaagtggaaagctgcagcggttcattctgcgcagccaggaaatagccaaacagcaggcactcgacacatgactcacgggcgaatggttcctgtgctgagccgaagggagtttcagcgcagagccctggagttgttcaaggagcgcagtttcagccaagtgagcgtgcgtgaattggcggcgcatatcggcataagcccgggagcggtttatcatcacgtcgagagtaaagaggccatgctgtttgaatggctgatggagctgtatcaggcgttgttgtcgcatgttgatttgatcaaaacgcgaagattgacgcccgcgcaacgcctgacaacactgatcgacgctcacatccaactgtatgaccacatgactgtgcacttcaagttggccgtcatggatgccaattgtctaggcgcagcaatgcaggcacgcgttgagcgattgaagcttgcctatgaggcagaattcataaaatgggtcgaccaggcttgccatcagcctggcgggccgttgcgcgagtgtgcgctcacagccattttgccgatgctcaatagcctgcctgcatggttgagccccatgatcgataacgctcagcgtcgagtgatcgcaaagaccatcgccgaagcagtactacacgcgataaacgcgcttccttccaacacgtcgccctgaacggcgagatgcgctgcgctgggtgatgatagacccacccagctttggcgaaccgtcccgcgggctaagccacctgggtcgcaaacctgccaacggcgtcgaccacccgcttggcaccgtcctgaatttcaacaatcacctggcctgcctgagtggcaagctcaaggccttgctcggcttgggacttgctgtttgccatctcagcgacggtttcatcgaccaacttctgattctgcaagacaaccgacgcgatttcttcagtcgctgtgctggtccgtccagccaattgtcgaacctcatcagccacaacggcaaatcctcgaccttgctcacctgcgcgagccgcttcaatcgccgcattcagagccagaagattggtttgctgcgcgatgctgctaatcgtctggataattgagctgatcaacaatgactgtttgcccagcgcttctactcccccagaggccgcctgcatatcaaccgcgattttacgcatggtatgcatcgtgtcgttgacgacgactgcgcctcgttgagcgctgacatccgtttgctgagatatttcaaatgccgtttgggctgccccgctcacttcatgctcacggtccacttgatcggtcactaccgtcgcgaacttcactactttgcaaagattgccttcggtgtcgtaaaccggattgtaggttgcctccagccacaccgtttgtccgcgactgtctatacgttcgaaccggccagcgacaaactcacctctgttcagctttgcccagaagtccttgtactcctgggacgaagtcagctccggtttacagaaaacacggtgatggctcccttttgcttgtcccaggttgtagcccatggcttgtaaaaactgatcatttgccgtcagtacatgcccagagagatcaaactcgatcaccgcggtagaacgtaacaacgcctcgatgaatgaggcattttccgaggctttttctactcgggacgtaatgtttgtcgcgtagcaagtgatgtggctcagctggccgctcgcgtccatgatgggctgccaatgtgcatgaatccacaccaacgaaccatcggcatgaaggtatctgtaatcgtcgctgatcgacttccccgcggccactgcagctcgaaagttatgaaagcacggcagcttggagacgtactggggaacaatctcggccatggggcgacctacaagccgatccggagcatagcccagcgtatttccaaagttttcgttgcaggccatgatgttaaatgagggatcgatacttaacgtcagcatttcacgatccaggccatcgcgcagttggcgaagctctaacagttcactgttctgagattgaagctgtttcttaaggcttgcattgaacataggaagtcgcctcttgggtcatacctatcgtatcggcgtctcatggcacaaattgagggcgtggaccaagaatgaccgctggccccgtgaggaaatcatctggtccaaggcagttgcggacctgaacatcagcgaaatcaccggggagttttgcgcaggcacaaaaaagccgatctagttgatcggcttaagagtctgattttactcaggaataatggtcgggacggagtgattcgaacactcgacccctagcaccccatgctagtgcgctaccggactgcgctacgccccgactaggcgtgttactgggtttgcttcttgacgaagcgaaccggaatataccgcaagcttttgaaatgtggaagtattttaaaagccggaattactttttcagaaccaccagcacatcttcgagttcggcgatcatctggcggatcatttgtttgtattgggtggtgtcgtctttggcttcatcaccggacatacgctggcgcgcgccgctgatggtgaacccctggtcgtagagcaacgcgcggatctgtcggatcatcagcacatcctggcgctgataataccgacggttcccggtgcgtttgacggggttgagttgaggaaactcctgctcccaatagcgcagcacgtgcggttttaccgcacagagctcgctgacttcaccaatggtgaagtagcgtttgcctgggatgacgggtagctcgtcgttatgacttggttccagcataagcctcaactcgggccttcaacttctgccctggacgaaaggtgaccacacggcgagccgtgatcgggatttcttctcccgtttttggattgcggccaggccgctggcgtttgtcccgcaggtcaaaattgccgaaaccggacaatttgacctgttcgttgtcttccagagcgtgtctgatctcttcaaaaaacagctcgaccaattccttggcctcgcgcttgttcagacccaactcttcgtacagacgttccgccatctcagctttcgtcaaagcccccatacgtcacttccttaacgtggcgttcaacctttgttcgagcgaggtgaggatattttgtgtcgtggtattcacctcatcgtcattaagagtgcgcgatggatgctgccaggtcaagccaactgcaaggctttttctatgcggatcaatacctttaccctgatagacgtcaaatagcctgaggtctgtcagccattcccctgcattttcacgaattacatccagaacggcagtggcggctacttcacgatcggcaatcagcgccaggtcacgacgcacttcagggaagcgcgacagctcgctgaatttaggcattttgcccgaagccacttcagccaggagcagttcgaacacaaataccggacgatcaagaccgagggttttcgacaattcagggtgaatggcgccgacgaaacctaccaaacgcccttcgcgctcaacgcgtgcagtttggcccgggtgcaacgccgggtggctgcctggtacgaaggtgaacgcgtccagtgcaccggcaaagcccagcaccgcttccacgtcagccttgacgtcgaagaagtccacggcatcgcggccctgcgcccaaccttcgggcaggcggctaccgcaaacaacaccggccaacatcggctcttgcttcaagccatccagttgaccaacgaaacgcaggccactttcgaacatgcgcacacggtcttgctgacggttcaggttatgggaaagtgctttcaccaggcctggccacagggacgaacgcatggctgccatgtcgttggagatcggatttgccagcaacagcggctcgacgcccgggttgaacagttcgaactgcttcggatcgatgaagctgtaggtcacggcttcctggtagccacgggcaaccagcaggcgacgcagttcaggcaaatgcgcacgcgcctcggccttaggttgcggcgccagacgcgcttgcgggtaacgaaccggcaggcggttgtagccgtagaggcgagccagctcttcgatcaggtcgacttccaggctgatatcgaagcgatggcttggtacttcaacggtccactgcccttccccgcctgcggaaatacccaggccgagggcggacaacagttgctcgatttcagccggtgcgatcaccaggccgagcatctgctcgacgcttttggcgcgcagggtgatcggcgcaaccgacggcaggaactgttcattgacggtttcggtgattgggccggcttcgccgccggtgatttccagcagcaggccagtggcgcgctccatggcttcacgggcgaggttccagtccacgccgcgctcatagcggtgcgaggcgtcggtgtgcaggccataggaacgggccttgccggcaatagcgatctgatcgaagaatgcgctttcgaggaatacgtcgcgagtggtcgcagatacgccgctgtgctcgccacccatcacgccggcaattgccagggcgcgggagtggtcggcgatgaccagggtatcggcacgcaggctgacttcctgaccatcgagcagcaccagtttctcgccttcttctgccatgcgtacgcggatgccgccgttgatttcggcaaggtcgaacgcgtgcagcggttgacccagctccagcatcacgtagttggtgatgtcgacggcagcgtcgatgctgcgcacgtcagcacgacgcaggcgctcaaccatccacagcggggttggcttggacaggtcgacgttgcggattacacggcccaggtaacgcgggcaagcgttgggtgccagcacgtcgatcggacgtacttcgtcgtgcacagcgggtacagcagcaacggccggacgcgtgaccggggcgttgtacaacgcgcccacttcacgcgccaggccggccagggacaggcagtcgccacggttcggagtcaggtcgacctcgatgctggcgtcttccagttccaggtaaacgcggatgtcctggcccacgggcgcgtcggcaggcagttccatcaggccatcattgccctcgccgacttgcagctcggcctgggaacacagcatgccattggactcgacgccacgcagcttggccttcttgatcttgaagtcgcccggcagctcggcaccgatcatggcgaacgggattttcaggcccgggcgcacattaggcgctccgcacacgacctggaaggtttccgtgccattgctgacctggcacacacgcagcttgtcggcatctgggtgttgctcggtgctcagcacctcgcccactaccacaccactgaaaacaccggcggccggggtaacgctatcgacctcaagaccggccatcgacagacgagcaaccagctcgtcgcgatctacttgcgggcttacccagccacgcagccattgttcactgaatttcatcctgctctcctaaagattcgttacgactagcgaaattgcgcgaggaaccgcaagtcgttgtcgaagaacagacgcaagtcgttcacgccgtaacgcagcatggccagacgctctacacccatgccgaaggcaaagcccgagaattcttccggatcgatgccggacatgcgcaacacgttggggtgaaccatgccgcagcccatcacttccagccagccggtctgtttgcagacgcggcagcctttaccgctgcacatcacgcattccatatcgacttcagcggacggctcggtgaacgggaagaacgaaggacggaaacgcaccgccagctccttctcgaagaacacccgcaggaattcttcgatggtgcccttgaggtcggcgaagttgatgtcgcgatcaaccagcaggccttcgacctggtggaacatcggcgagtgggtgatatcggagtcgctgcggtacacacggcctgggcagacgatgcggatcggcggcttgttcgcttccatggtgcggacctgtaccggcgaggtatgggtgcgcaacagcatgttcgcgttgaaatagaaggtgtcgtgcatcgaccgggccgggtggtggcctgggatgttgagcgcctcgaagttgtgatagtcgtcttcgacctcagggccttcggcaatgccgtagccgatgtgggtgaagaactgttcgatacgttccagagtccgggtgatcggatgcaggccacccgaggcctgaccacggccaggcagggttacgtcaatggactcggcggcgagcttggccgcaagatcggcctcctcgagcgacgccttgcgtgcattgagcacctctgtgacacgctccttggcgacgttgatcagcgcaccgacttgcggacgctcttcagccggcaaattccccagggtcttcatcacctgagtcaattcaccttttttgccaaggtagtgaaccctgatttgctccagggcatttacatcttcagcgctttgcacagcctcaagggcttgagcgacgagcgcgtccaggttttccatgtacagactccagatacaaaataggggaagagcttgaaggctcttcccctatttatgacgtttaacaccttgggctacagagtaacccagggtgactgtcgggggtacttaagccaaggtggctttagctttctcgacaatcgcagcaaacgccgctttttcgttcactgccagatcagccagaaccttacggtcgatctcgatggacgcttttttcaggccagcaatgaaacggctgtaggacagaccgttaacacgtgcaccggcgttgatacgagcgatccacagagcgcggaactgacgttttttctgacgacggtcacggtaggcgtattggcctgccttgattaccgcttgcttggcaacacggaatacgcgtgaacgcgcgccgtagtagcctttagcaagtttcagaatttttttgtgacgcttacgggcaatgacgccacgctttacacgagccatgagttacttcctctattcttgatccaaaaattaacgaaggcgcagcatgcgctcgacttttgccacgtcagacggatgcagcaagctgctaccgcgcagttgacgcttacgcttggtcgacattttggtcaggatgtggctcttgaaagcgtgcttgtgcttgataccgttagcagttttcagaaaccgcttagcagcaccacttttagtcttcatctttggcatgttcggatactccgcattcagttgataaacataatcagaaggcctgccgtgccctgttgattacttcttctttttcggggcgatgaccatgatcagctggcgtccttccatcttaggatgctgttcgaccgaaccgtactcgagcaggtcagcttcaacccgcttgaggagttccatccccagctcctggtgggccatctcacggccgcggaatcgcaaggataccttggccctgtccccatcactcaggaaacgtaccaggttgcgcagttttacctggtaatccccttcctccgtccctggacgaaacttgatttcttttacttgaatctgcttctggttcttcttcgccgcagcaatctgcttcttcttctcgaagatcgacttgccgtagtccatcacccggcaaacaggcgggactgcgtcggcggagatttccaccaggtccaatttggactcttcagcgatacgaagcgcttcatcaatcgagacgatgccaatctgctcgccgtcagcgccaattaaccgaacctcgcgtgccgagatattctcgttgatcggggctttcggtgcagctcgtttatcttgtctcatttcacgcttaataataattactccgaatctgggcgaccacgccgggaaaccgcttgcgcgaggaactcagcgaactgggcgacgggcatcgagcccaggtcagcaccttcacgagtacgcacagcgacagtctgcatctcgacttcccgatctccgataaccaaaagatagggaaccttgagcaaagtatgctcgcggattttaaagccgatcttttcatttctcaagtcggacttggcacgaaatccgctttcgttgagtgttttttcaacctcagcggcaaaatctgcctgtttatcagtgatattcatgatcactgcctgggtcggagccagccacgcagggaatgcaccctcgtagtgctcgatcaggatcccgacgaaccgttcgaacgagccaaggatcgcccggtgcagcataaccgggtgtttacggctgttgtcttcggacacatattcggcgcccagacggatcggcaggttaaaatcgagctgcagggtaccacactgccagacgcggccaaggcaatctttcagcgagaactcgatcttcggaccgtagaaagcgccctcgcccggctgcagatcgtacgcaaggcccgcactgtcgagcgcagcggccagtgcagcttcggcgcggtcccacagttcgtcggagccgacgcgtttttccggacgagtggacagcttcatctcgacgtcggtaaagccgaaatcgcgatatacatccatggtcagcttgatgaacgcggcggattcagcctgcatctgctcttcggtgcagaagatgtgggcgtcgtcctgagtgaagccgcgcacgcgcatgatgccgtgcaacgcacccgatggctcgttacggtggcaggcaccgaattcagccaggcgcatcggcaactcgcgatagctcttcaggccctggttgaacacctgcacgtggcacgggcagttcatcggcttgatggcgtaatcgcggttttccgactgggtggtgaacatgttgtcggcgtagttggcccagtgcccggatttctcccacaagctgcggtcaacgacctggggtgtcttgatctccaggtagccgttctcgcgctgaaccttgcgcatgtactgctcaagcacctggtacagggtccagccgttcgggtgccagaacaccatgcccggcgcttcttcctggaggtggaacaggttcaggcgcttgccgatcttgcggtggtcgcgcttttcggcttcttcgatgcgctggatgtaggccgccagctgcttcttgtcagcccaggcggtgccgtagatccgctgcagttgctcgttcttcgcgtcgccacgccagtaggcgccggacagtttggtcagcttgaaggacttgagaaagcgtgtgttcggcacgtgcgggccacgacacatgtcgacgtattcttcgtggtagtacaggcccatggcctgctcgtccggcatgtcttccaccaggcgcagcttgtagtcttcgccacgggcggtgaacacgtcgatcacttcggcacgcggcgtgactttcttgatcacgtcgtagtctttttcgatcagctggtgcatgcgctgttcgatggccgccaggtcgtccggagtgaaaggacgctcgtaggcgatgtcgtaatagaagccttcgtcgatgaccgggccgatcaccatcttcgcggttgggtacagttgcttgaccgcatggccaatcaagtgcgcgcaagagtggcgaatgatctccagcccctcttgatccttgggcgtgatgatttgcaggctggcatcggaggtgatcaggtcgctggcatcgaccagcttgccgtcgaccttgccggctacggtagccttggccaggcctgcaccaatggatgcggcgacctcggctacggaaaccgaatgatcgaatgaacgttgactgccgtcgggaagagtaatagttggcatggcgcctcctctcctagtggtgacccctaccaaaggtcacgtgggttgggatgagccagtacaagatccaacaccaggccgttcaatgatgaacgcctgccttacagcggcaggagcctttcggccaaccgataatcgaaccagagtgactggagtgagctaaaaagaacatggcaaggcggcaattggcgcgcctggaaatagccaagcgcaagatgctagcacagatgaacggtcatcgcggcgctgctatcttgtgtaacgacaaaatccgcgctttatagccgcaaaagtgaacttgagctgtacgcaatgcctcaaacccactgagaatcgccgttcgtcctcgacccaaaggagcatcctcatgatgcgttttacctctaccctcgctctcgccgcttccctgaccctcctttccctcggtgcacaggcagccgccccgtcgaactggccagccggtgcccgtgacagcttcgtcaacgactgcagcgcagccgccagccagaacgtagacgtcaagaccgccaaagaccactgcgaatgtggcgctgacaaaatcaatgccgaattgagcactgcagaaatcaaggaactcatgaccaacccgaacgccaagcctgagcttaaaaacaaagcggtcgcggctatttcgtcctgcaaagtcgtgaagaaaaagtaagatcggccacagatcagacggctttttatcgggcaaaacagcctgaaaactgccatttctcacaaaatacgcagcttttacggctttttttaccagttgatatttcgagcgaaagccccgtagatcggggctttcagccgggacaggtattaaacgcaacgctattgattagcaaacaatgccttgggggggctcccaagccgaacatttcgactatgatagcccggtgtgcccagttggcctgagcagcacagcactactgaaaatatatgtttcttggagatacaccatgtctaatcgccaaaccggcaccgttaaatggttcaacgatgaaaaaggcttcggcttcatcactcctcaaggtggcggtgacgacctgttcgtacacttcaaagctatcgaaagcgacggtttcaaaagcctgaaagaaggccaaaccgtttccttcgtggctgagaaaggccaaaagggtatgcaagctgcacaggttcgcggcgagtaattctccgctgagctaaaaaaaccccgtccatgtgacggggttttttatgggcactgcaaaagccttgagagacttagccgcaattgacccgcgtgatcaccaggttgtcatcggtgttcaggttgaggcggtcggagcggtattccagggtgatcatgtcgttaggcttgaggatacgtgcgttctgcgcaccggcacgggtacgcgcctgttccagcaactggggcgaggctttctggccgatggtgaattcggcggctttcgactcacagcggctatgaccggcatcggccacggcggcgtctttggctggctcagaggcacccggggtgctgcaacccgccaatgcgagtgccgccaacaaagtaccgaatgatgcgagcttccaaggcatgaagcctcctatgataaaaaatggacagagatcgtgcgacagcgattgggcggattggtttcaagacgtaaaccgccgccgggcaagtttgcctgagtcgggacaggcattcgcccgctcaatcgtgaccggatatgaatgtgctcagtagatgtcgatgtagtcgaatgccggcttcggccagttttccttcagagcattgaagatctgtgtcacccagacttcatcactggcggcaacattacctacgtatccggagcccttggcccaggtctccaggcgaaacagcaggccgtcgatatccacgccacctacaacccttcctgaagagatataggcgattccggccttggtcacccgcaactgggcatgttcgtcgtcactggcactggcgagaagctggcgcacattcgccagtgtcaggttctcggggttgttcaaatcgatctgcacgtggtgtccccggcaattaaacaggcggacagtgtcgcacagcagtaacgtcatgccgaaccgccccatgcctaagtatcagtgccaaacgcaatgcaaaatgtttaactggccgggtaagaaccgcgttccagcgcattgccctgtattttcagccccgtgagaccttcatgaccaccgtaacgctccaagccgatatcaaagccaagtggccccaaggacaaagctcatacagccccggcagcccagaggaattggcgattatcggcatcgacctgctggtcaaggaactgggtacgcaggcagcgcaagcgttcatcggccagatattcgagaaatacccggccgatcacatgggggcacacgaccccgagcgcgaataagaaccggctggcgcacgccgaccggtcaacccattacttcagacgcgccaggcgctcggtcagcagatcgaagaagccctgggcatcaccgttctccacccagaacgcgttcttcggttgtttcaggccgtcgtaccagtcgacgatggtctggccgaaggttggaccttcacggctatccaccaccacattgacttcacgaccgctgaacagcgaaggcttgagcaggtaagccacgacggtggcgtcatgcaccgggccgccgggaatgccgtagtgctccatgtcgcccttgacgtattcattgagaatatcgccaaccaccttgctcgcgttgttcttgaggtcggcgatctttttcaggcgggcttcgctggtcagtaccttgtgggtcacgtccagcggcaggtaagtcagcttgacgccgctcttgagcacaatttcagccgcaaccgggtcggcgaacaggttgaactccgccaccggcgtgatattgccgccgttgaagtgcgcgccgcccatcacaacgacctccttgatgccctgggtgatttccggtgcctgggtcagcgccagcgccaggttggtctgcgggccgagcatcgcgatggtgatgctgtgcggcttggcagtgctgagggtcttgatcaggtaatcaaccgcattgccgtcagccaggccctttttcggctcatgcacggtgacgccggaaatgccttccttaccgtgaatattctcggcgtagatcggcgtgcgcagcagcggtgcgggcgcaccagcgtacaccgggatgtcctcgcgccccgcccactcacgggccaggcgtgcattgcgggaggtcttgtccaggcgcacgttgccggcgacggtggtgagcgcgcgaatgttcagctcatccggggaggccatggcgaacagcaatgcgaccacatcgtcagcacctggatcggtgtcgatgatcaggtcgattttttccgccgcctgggcgcttgcagcagtgagcgcagacaaaagcaggacactccggaacaggtttttcagggttggaagaccatattgcataaaacactccttgtcgttgagaacgctagaacgttacgccggacaccagcgcgatattgcagtagggctggcattcaccggtgcgcactaccgcgcgcgcgttgtgagtgagctgcttgaattcgtcatggctgaccagacgccgctcaccgatggccgcctgttctgtgagcgcattcagctcggccaaagccggtggttgcttgagcaggatttcttccgccagcacatggcgttcaacctgcatctcgctgagcacgatacgcaaggtgctgatgaaatccgggatgccctgggtcaacgccaggtcgatcagctcgacacccggcggcaccggcaggccagcgtcaccgatcacgaggatgtcaccatgcccaagcgaggcgatcacgcgcgacagggcaatattgagcagaggtgtctttttcatgagggcacaaaaccttgtacgtcgtgcagcgttggaatagagggttgcgcaccggcgcgggtgaccgacaacgccgccgcgacctggccaaaacgaatggcctcggcctcgctcttgccgttggccaacgccgccgcaaagccaccgacgaacgtatcacccgctgccgttgtgtctaccgccttgaccttgggcgcaagcaggtgctcgaaattcaggccgtcggtaaacagtgcgccctgggagcccaaggtaatgatgactttgccggcgcccgcctggatcaggtgggtggccgcagccttggcactgtcaatggagtcgacggccacaccactcagtgcggcagcttcgctttcattgggtatcaggtaatcaatcgaggcgtaccactcagccggcaacggcgcgctggccggtgcagggttgaggatcaccgtcttgcccagctcacgaccgcgcttgagggcatagcccaccgtattcatcggcacttccagctggcagacgatcacctcagccgcctgcagcaccgcatcaaacgcctgcaatgaggctggcgtcagttcgccgttactgcccgccacgatcacaatcgcgttctggctgctgtcatcgaccacgatcaaggccacgccactggaaccgtccacggtgctgacggcctggcaatcgatgccttccaccaccaacgcatcgcgcaactggatgccataggcatcgctgccgacacagccgatcatcgacacatcggcccccaagcgtgcggaggctaccgcctggttcgcacccttgccaccaggcacggttgagaatgtctggccgatcaaggtttcaccggcacggggcaaccggctggcacgggtgaccaggtccatgttcaagctgcctattaccactacttttgctggcatacatcagtactcatcaattcggttcagcggtattgggcgaacgtaccggagacaggtgccgtcgactcacgcaacacgatgctcggcgtcacgatgcgttgatcaatcggcatttggggtgttgcaattcttcgcagtaaaagttcggccgccgtctcgcccagttgcacgatcgactgcccgaccgtggtcagcgccgggtagacgtaacggctcatttgaatatcatcgaaaccgatcaccgacagctcacccggtacgcggatattgcgctctgccgctgcacgcaacacgccaaaaccaatcatgtcgttactggcaaaaatcgcactgggcgggttttgcgccagcaaatgcacagcggcggcataaccgcccgtgctggtgaaatcgctttcctgggtgcggttggcggccacctcgacaccggcctctcgcagcgcacggtgatagcccgccaaacgcatttgcgcgacacgggtatgggcagggccgccgatgcaagcaatgtcgcgatggcccagttcgagcaagtgccgggtcgccagataggcgccctcctcgtgatcgatacgcaccaggtccacatcaatgccatccagcgcccggtcgacaatcaccatgggcgtgcgcaccgcgctcaagccagcggcaaggccactgtcgtcaccgcccaccgaggtcacgatcaagccgtcgacgcgcttttccaacagcacgcgcaaatagttgcgttgcttttcagcattgtcgtcggagttgcagaggatcacgcagtagccgttacgctcgcagtaatcctcgatgccgcgagccaattccgcaaaatacgggttgaggctgttgggcaccagcaaaccgatcgtggccgtggtcttggccttgagtgagcgcgcgacggcactgggcacatagtcgagctgcttgatcgccgcttcaaccttgatgcgcaccggctcactgaccgggcgagtcttgttcaccacatgggacaccgtggtgtaggaaatacccgcaagcgctgccacatccttgatcgttgccataggtcagccccgccgactggcgcgctggctgcggtaggtgtcgaggaccacggcgatcacgattacggcaccggtgatgatgcgcttggtcggttccgtggccccgatctgcgccaggccagccgccagtaccgaaataatcaacacaccaaagaaggtactgatcaccgagccgcgcccgcccatcaggctggtgccgccgatcaccactgccgcaatcacttgcagctccaggccggaaccggcgttcgggtccgccgcttccaggcgcgaaatctggaacagcgccgccacgccggccagcaggcccatgaggctgaacaccaggatcttgtaaggttttggattgatccccgccaggcgcacagcctcttcgttggtgccgatgccgatcaggtagcgaccaaacacagtgcgggtgagcaccagctgcgcggcgatgattaccagcaacgcgatgatgaacgacggtgaaataccaaaggcaatcgggttggacagccaggcaaacgaatccccgatgtaagcggtgcgcgagccggtcatctggtatgcgacgcctcgggccatttccagcacgccgagggacacgatgaacgatggtatgcgccaggccacggtgatcgagccggtgatggtaccggccaacgccgcgcagcccatgcccagcacggcagccggcaacacgctccagccccagccgaggatcgctacgctgacggccgatgcagccagtgccagcaccgagcccaccgacaggtcgatcccaccgatgatcaggatgaaggtcatgcccaccgccagtaccatcaggtccggaatctggttggccagggtgctgaaggtgtcataggacaggaagtgatcgctgagcaccgagaacagcgcaatcatcgccagcaaggcacccgcaagacccaggtaggtgcccaggccatagaagttgccgccggtcttgccaggggaagttgtggttttcatggggtatccctaagcactgcgtcgttgagcagcgcatcacgtttctgatagccagcaaaggcggcggcgagcaattcgtcctgggtccagctgtcgcgctcgaaggtctcgatcaagcgcccggcggacaacacgccgatgcggtcgcagatcagcatgagttcacgcagatcactggacaccaccaccagcgctttgccctggcgggtcaattcgcccagcaaggcataaatatcgaacttggcacccacgtcgatgccgcgggttggctcatcgaacagcatcaccgagcagtcgcgctccagccagcggccaatcactaccttctgctggttaccgccggacagttcggaaaccaactgcgccggactggaactgcggatgcgcatggcgtcgatctgacgcttggccaaggcggtctcgtcgcggctgctgaccacgccaccgccggagatttccggcatgttgcccagggcaatgttggcgctgatggactgggtcagcagcaggccctcacccttgcggtcttcggtgatcagggcaataccgtggcccaccgcatccacgggcgagcggatgctcaccacctgggctggcgaaccaagcgccacggtgccgctgtcggccaggtcggcgccgaagatcaggcgcaacaactctgtacgaccggcacctatcaggccggagataccgtagatctcaccggcgcgcacttcaaaggacacgtcgcggaccttgtccgagcgagtcaggccttttaccgtcaaggccggaccaccaatggagcgcgggcccaggtcgatgtgctcgcccagctcacgaccgaccatcaaggtgaccagttgctcactgttgtaattggccatcggctcgacacagaccagtttgccgtcgcgcagtaccgcaatgcgctgggcaacacgggccagctcttccagccggtgcgaaatgtaaatgatcgccacgccccgggcctgcaagcgggtgatttgttcaaacagcatctcgacttcacgggccgtcagcatggccgtgggttcgtcaaggatcagtacgtggcagtcgccgatcaggttgcgggcgatttcgaccatttgctgatggccaatacccaggctgccaaccagcgtgtccggatcgatggcatccagcccgacctgggccatggcctcgattgcagccttgcgcagttgcttgcggctgatccagccacagtggctgggcaggttatccaggaacaggttttcggcaacagtcagtgtcggcagcaggttgagctcctgcatgaccatacgcacgcccaactcttcagcctgggtgcggctgccagggcgaaaatcctggccgttgaactgcatgtgcccggtagtcggcgtgaccagcccgccgatgatcttcgacaaggtacttttgcctgcgccgttctctccggtcagcgccagcacttccccgcgattgagcgtcagggtgatgtcggacagaaccggttgggcataggtcttgccgataccgctgaccgagaggacagcgttcggggcggaagatgacataggaaaatctccaggcgcccgcccaggacgagcgggcgctgttgggtgctgccaggattacttcttgaggacgagttcgaccggggtttcgatcacgccatctttggcatcgactttctcacccttgaccagcttgagcgcattctggataccgaacacggcttgctgggcagcagcctggtcagcggtcgccaggacacggccgtcctgcagcatcggcttgatggcttcgatgttgtcgtagcctacgaccagcaccttgccagccttgccggccgcgcgcacggcagagacggcgcccagggccatgttgtcgttaccggccagcagggccttgaggtcggggtattcactcagcatggcggatgccactttctgaccctggtcgatttcccagttgccggattgggtggagacgatcttcatgccggcagcgtccatcgcatccttgtagcctgcggtacgttgctgggcgttggtggtcgtcggaacaccctcgatgataccgaccttgtcacccgaggccagttgcttggccaggtagtcgccgaccagcttggagcctttgcggttgtccgggcctacgaaggggatgtcgaggttcttgcttttgagcacgtccgggtccaggcggttgtcgatgttgacgaccttgataccggcgtccgaagctttcttcagcacggtgacaagtgccttggagtcggcaggcgcgatgacgatggcgttgaccttggcgaggatcatctggttgacgatgtcgatctgcgcactggtatcggtttcgttcttgatcccgttggtgatcatgtcgaaatcggtggcgtgttctttctgatacgccttggcaccatcctgcatggtgacgaagaattcattggcaagggatttcatgaccaggccgaccttgggtttggcggcgtcatcggcaaatgcagaggagagaggcagggcagcagatgcagcagcaagcacagcgacagcaagaagacgtccagcgaatggcagcttcatgggttcactccgatcttatgattattgtgagcaacgcttgcaccgaagaccccttcggcagccttcccacccgggcggctgatacgagctgtcacgatactcaaggagtgctccgtgaaacatctcgcaaacgtttgcgttattcaaactatgagaaccttgtcgagatttgtcaacggttgaaaacagcctttcatccacgccctccctcccgcttgagcataggtgcagttaaacatcgcaccctctcggtcgctccttaaaacgacaggctggtgcgcatcattcatgcatcccccaaagcctggcggtcaactttttcggacaaccgaacacaatgcagtccgatgttcggaaagccggacacccacattatcaacaaacccgaaaaatcaatattaattgttataaatcaatcatttaaattgttttagcgatcacgctgagcctggtacagatcctgctctaccccatcacctcgtggcattcagaaccgcccgggtgttctagatgaacctgctacagcactcatcaaaaaccagagagaaaaataatgaaatctgcactgaagacttttgttccgggcgcgttagccctcctgctgttgttccccgttgccgcccaggcaaaggaagttgaaaccaagaccaaactgtccaacgtggtgatcctcgccaccggcggcaccattgctggcgccggtgccagcgcagccaacagcgccacctaccaggcagcgaaagtcggtatcgagcaattgatcgcgggtgttcctgagcttagccagatcgccaatgtgcgtggcgagcaagtgatgcaaattgcgtccgaaagcatcaacaatgaaaacctgctgcaactgggtcgccgcgtcgccgaactggccgacagcaaggacgtggacggcatcgtgatcacccacggtaccgacaccctggaagaaaccgcctacttcctgaacctggtggagaaaaccgacaagccaatcgtggtggtcggttccatgcgaccaggcaccgccatgtcggcggatggcatgctcaacctgtacaacgctgtggccgtggccggcagtaaggatgcacgcggcaaaggcgtgctggtcaccatgaacgacgagatccagtcgggtcgcgacgtcagcaagatgatcaatatcaagaccgaagcgttcaagagcccatggggcccactgggcatggtggttgaaggcaaatcctactggttccgcttgccggccaagcgtcacaccatgcattcggaattcgatatcaagaacatcaagagcctgccggacgtcgagatcgcctatggctacggcaacgtgagcgacactgcctacaaggccctggctcaagcaggcgccaaagccatcatccacgccggcactggcaacggctccgtgtcctcgaaagtcgtacctgccctggtggaactgcgcaagcagggtgtacagatcattcgctcttcccacgtgaatgccggcggcatggttctgcgcaacgccgaacagcctgacgacaaatacgactgggtcgctgcactcgacctgaacccgcagaaagcccgcatcctggccatggtcgccttgaccaagacccaagacagcaaagagctgcagcggatgttctgggaatactgattcctgactgcccccctgtaggagcgagtttgctcgctcctacaccctcacgctccgccctacatccaattgcctgaattgctgtaagacgaacttcttgaattttaagtagttgcgaaatcacctacagttaaatactgtatgtgcgtacagcttattaaggaatactccgtggcaaagtcctcttccgcagtgcccaccgcacctgatgcctacgaacgcctggctattcgcgtgcaaaagatcatcaattcaaccaacgcccagaaagccaaggcagcgttgatattccgtttgccggacgagcctgaggatgaatgggcgcgcttactggaggaaatcgcagagaacgacaatgtcaccctcgcctatcgtgacgacggtggcgtacagattttctgggttgtaccgaaggaagattgattcaatgattgtccgttttatcgcggtgtgctgcctgttttttgccgtcaccgcccacgcccaggcgccacgcacgttcagtgaagccaagaaaatcgcctggaagctctacgctccacaatccaccgagttctattgcggctgcaagtacacgggcaatcgcgtggacttgaaagcctgtggctacatcccccgcaaaaacgccaatcgtgccgcacgcatcgaatgggagcacattgttcccgcctggcagatcgggcatcagcgccaatgctggcaggacggtgggcgtaagaactgcacgcgccatgatgacgtgttcaagcgcgccgaagcggacctgcataacctggtgccaagcatcggcgaagtaaacggtgaccgtaataacttcagctttggctggctgccggtacaaagcgggcagtacgggtcttgcctgactcaagtggatttcaaggccaagaaggtcatgccgcgcccttccatccggggaatgatcgcccgcacctatttttatatgagcaaacagtacggcttgcgactgtcgaaacaggatcgccagttgtacgaagcctggaacaagacctacccggtgcaggcctgggagcgccagcgtaaccagacagtggcgtgtgtgatggggcgcggcaatgagtttgtcggcccggtgaatctgaaagcctgtagttgaaaatgggcgaaactcccgcccacccggcgcgttactgtgcagccttgtgctcgacaacctgcgattcagtatcggttttcttggcgcgcgccattttctcgttgagcagtgcttgcttggcctcggcttcagccttggtcgcgaacggccccagcaggacttcgtccttgccgtcaaccttcacgatgtaaaagttgaaaccatgttccagcaaccaggccgtaaggtcggtgatggcctgtagcttgtggtccggcggccctacccatacatcccattcctgggcagcaatcgcgccggtttgcggctgggtttcggtcacggcaggcttgctcctgggggcctcgacgcgtttgccctcaccgcaaccggccaatgccaacaccgccattgccatcgctactttacgcactgccctgctcctttaaagataaagaggcgactttatcattcactgtctattctggccgtcataaacgttggcttaaacaatgcgaatcatgtatcgcagacctgtatgatgccgccatgggaattaatgtcgcctctatgcgtcctaaaaagaggcagtcacagggaagcgcttagcagtaagctacacacatccgacacctgccctgtctgaaacatgtgtccttaaaagtaatcaaggagaagtccatgctgatactcacccgcaaagttggtgaaagcataaacatcggtgatgacatcacgatcaccatcctgggcgtcagcggccagcaagtacgaatcggcatcaacgcacccaaggatgttgccgtgcatcgcgaggaaatctaccagcgcatccaggccggtttgactgccccggacaaaaaccagacgccttgaagcgccctcagtagccagccctttcgtacactgtaatggctggcgaaaacctcttcacaccgctcttgtcattgctgcgtgactgacgccaccaatgcgttcatcttcatggaaagatgaaactgtcttcacgcccggaacttgttgtttcattctcagccgaatcttctgactgacactcagccatccgtgtgcattcaggagcacgtcgatgcggcccagacccccaccgccatttgcctacacgtcttggatgatcgccttatcgataggatgggtcttcgcagggctggcctatggtttgaagtatgcaatcgaaggctccggctccaccgcccctcgttcagggctggacttggcgctgctgctttgcgggtacttgttcctgttttgtctcaaacctatccagaagtccgtgcaacgcaggttgtgtcggcaaacgcttcagtgacatcgcgctcatcgccagtagacaccggcatcaacagcgtcacagcgcgagcttggccttttcgtatcagcccgcccccctctgcaagtacaacaagccgtccgcgtcacgctgtacgtctaactgctgatacccgtctatcgaaggatggtcagtggtcataggcgtgtgatgcgtcgacgtcacgaccatcacatccgcgcctgcggcctctcccgcacgaatacccaccgttgcatcttcaaacaccaggcattcatgcaccggcacacccaggcgttgcgcccccaaaacgtaacaagccggattcggtttgccgagggccacatcttcagccgtcaccaataccgccggcggcgcaatgcccgcggcttgcagtcgacgcaacgccaactcccttggagcagaagtgaccaacgcccattgatcacccggcaggcggttcagaaacgccacggcgccggaaatcgccacaacaccttcgacatcattgatttcagcctcggtgatccactgcgcttcaacctcaggatcgacgcccggcaaggcctggcgtgtgatggtgtcgatcgcgcgggcaccgtgaatagtcgtcaagaaagccgccacatccaggccatgacgttcagcccagatgctccacacccgctcggcagcggcaatggagttgagcaaggtcccatccatatcaaacaaaaaggcacggtaacggcgattgaacacggctgaacctcggatagacactgagcgaattcctcatgagcggaaaaatgataggcccgatgcaatctacggatcgccttggtgcttgtaaacgctaccgaggtcgattgcattacaggtttgtaatggagcggtaagccttaccagcaccctcacttcatacagtggagtcgtcagtcacccacaccggatgacgccacttcctactgatgaaaagggtccccccatgaagcctgcaagcaaactctgcctgatcgccgccagcctgctgatgctgggcacaggtaccgccatggccggcaccgtggcgccggtcaaagccaataacgtggtgctggtgcacggttcctgggctgacggctcaagttggtccgaggtgatcacccgcctccaggccgccggtctgcatgtcactgcagtacaaaacccgctgacctcggtggccgacgatgtcgccgccaccaaccgtgtactggcccagcaagacggccccactgttctggtcggccactcctacgccggcaccgtggtcagcgacgccggggccaacccgaaggtcagcgccctggtgtacgtggccgcacgcgcgccggacgccaatgaagactttgtcgcgctctcggcaaagtatccgagcatgccggtgcgggccggcgttgaagaccacgacggctacctcaccctgagccaggaggccttcctcaagtattttgccggcgatgtgccgcatgccaaggccctggagttgtacgccgtgcagcagcccatcaccaagaccctgttcagcggtcgcactgtcaacgccgcctggcacaccaagccttcctggtatgcggtgtcggcgaatgaccagaccatcaatccagacctggagcgcttcctcgccaagcgcatgaacgccaccaccatcgagctgccttcgagccacctgtcgctggtgtcccacgccaaggaaatcaccgacctgatcctcgaagcctccggccgccagccctgagccctgcattacaaacttgtcatcatcctgttggttggctgttcggggtgcctggttactgtgaactcaacgccacgatctggcagccaaccccttaagagagataccgccatgaaactgtttatcctcggctttgccgctctgctcgctaccggttccgtgtttgcaactgaacctgtgatccatgacaaaaccggcttcttcgtacacctggatgtggccaaagtgctgtcgagcaccgacacctacggccaatgcggcattgtcccggcgcgcctcgactacctggacagccagggtcgcgaacatgtgttggactaccaggtccagggcatcggttgcgccagtgacaattgatcgggctacacttgcgccacgcattgagacggggcacttcccatgaacattcttgtagtcgaagacgaacccaaggccggcaattacctgctcaacggcctgcaggaactgggttactccgtcagcctcgcccgtgatggcgtggacggtttgcaccaggccctggaaacaccgttcgacgtgatcgtgctggatgtgatgatgccgaaaatggacggctgggaagtgctgcgtcgcctgcgcaaggaagcggatacgccggtactttttctgacggctcgcgatgacattgccgaccgcatcaagggcttggagctaggtgccgatgattacctgatcaagcctttttccttcgctgaactggtggcacgcttgcgaaccctgacccgtcgcggcccaagccgcgaagaggaacaactgcagatcgccgacttgcaaatcgatgtgctcaagcgtcgcgtcacccgggcaggcacccgtatcaccctgaccaacaaagagttcgccttactgcacctgttcgcaactcatcaggaccaggtgctgtcccgttcgctgatcgcgtcgcgggtgtgggacatgaatttcgacagcgacaccaatgtggtggacgtcgctgtacgacgcctgcgcctgaaaatcgacgaccctttccagctcaagctgatccacagcgtgcgtggcatcggctaccgcttcgatacccaaccatgaacacacgccgtcactactccctgaccctgcgcctggcgctgatcttcgccctgctcgccttcgccctgctggcgaccctcggcgtggcgctgtatcgcgagttggagcgtgaactgatcatgcgtgacgacgcagccttgatctaccgcatcgatcaattgcgcaacctgctcaatgacagcaacaccctggacctgatcaagaccaagccggagttgttccagaacatgctcggcaaccgcgagtcagtgctgagcatcgccgcgccaggccagaagcccctgctgacggtcaaccccggcaatatcgacctgccagacgttccgccggtccccaagaaccacgaactgacgttcgccgacgtgcaccattttcccggcatcaatggggtaccctttgcaaccctggccgcgtccatcgactccggtgacctgggcagcctgcaagtcaccacggggcgcctgatgaccgaacgcaccgccgtactcgccagctatcgcttgagcgtttatatcctggcgagcattgctgcaattatcctggcagtggtcggttacctgctggttcatcgtgggctggtgccgttgcgccgcttggcccggcacgcccagggcattggtgtcggcaaccttgccgaacgcctcgacagccacggtgcgccgaaagaactgctgccgatgatagattcgttcaacaccatgcttgagcggctggccaagggctttgtgcaactgggccaggtgtccaccgacatggcccacgaactgcgcacgcccatcaacaatttgctgggggaaacccaggtcgccctgcaacagcaccgcagcattgaaagttaccagcagttgcttgcgtccaatgtcgaagagcttgaacgcctggcgcggatgctcgacaacatgctgttcctcgcgcgcaccgacccggcgagtgctttgcgtcaacgccaggaactcagtgccgtggatgaggtggaacgcatcgccgagtactttgagggcttggcgggtgatgtggatatcagcattcgtgccgaaggtgaaggcgtgatctgggcggagccgatgctgctgcgcagagccctggcaaatctgtgtgccaatgccatcaaatatggtgcaccgagtaccgagctggagatccgcgccgtgccaagcgccgagggcattcacctgagggtcagcaaccaaggagagaccatcgccgccgagcatctgccgcgcctgttcgaacggttttaccgagtggatgagtcacgggaacgttcggcgcagtccaacgggttggggttatcgattgtggcaaccatcatgcaactgcacaacggacggtacagcgtgagcagtgaggcaggcgtgacgtgttttgagttgttctttccgaaacgggaagattgagcgcaaacgcccggtgttattttgcaaaggtttgtctcttaaccgctcgacgcaagccaggctaattttgcttcccaatgggctcaaggtagagccggcagcggtaaaacaatggagattccaaaatggaaatgcgattaggcttactggaaaaggggctggctgaaatgaatgagaagctgatcaccgtttcgagcaaggcagacgccatggataagcacttcgcttccaaggcagacctggcaactactgaactgaaccttatcaaatggtacgtggcaaccgcattcgccatgacaggcctggcttgcgctatcaccttcgggcttactcgactgtttgcgatttgaggagcgtcgggccgatcagctgacctgcccgcccgcttcctctgcatccacccgtgtttgccacgccaccagcacagctgtctgcagccccgcaaccaacgtatccaacgccattgagggccgctgtgaatctgccacctgctctggcagaaaaggtacgtggataaacccactgcgtaccccagaacctgcgagcgcatgctgcaacaaataaaacacctggttacacacaaatgtcccagccgtctgcgataccgaggccgcgactcccgcctcacgcacggccttgaccatcgccttgatcggcaaggtcgtgaagtaggccgccgggccgccgtctacaactgccgtatcgataggttgctccccgaggttatcggggatgcgtgcatcattgacattgatcgccacccgctcgattgagatatcgctacgcccaggccccaggccagtcgcaattaccatcgccgggtgcaactcttcgatcagcccggccaggcacgggcccgctgtggcaaatgcgcaaggcagtcgacgcgcaacaatctgcacgtcgctgcccagctgcacgccgtccagttggcgcacggcttcccaggaggggttgaccgggtcttgatcaaagggctcgaaacccgtcagcagaactatttgcataacggcctcacatcaacaggtaaagcagcacaatattgaccaccagcatcatcaacgcggtcggcagctgagccttgatcaccgcgttcttgtccggcagctcgagcaatgccgccgggacgatattgaagttggcggccataggggtcatcagggtaccgcagtagccggagaacatgccgatcgccgccatcaccgccgggttaccaccatagatgccgaccagcaccggcacgccgacaccgccagtcatcaccgggaaagccgcgaagccattacccatgatcaccgtaaacaacgccatgcccaacacgtagaccatcaccgccaccaacttgtaatccaggttgatataagtggtggtgacatgcgcgacagccgtaccaaccccagcttcgttgaacagtaagcccagcattgccaacatctgcggcagcaccatggcccagcccagcgcttcagtcaggcgacgggattcacgcaaggcttgcaccggcgtatcgcgggtcaaccagcacgccaggccaagggcgatcaggcagccgataccaagggagacaaaggtggtgtttttcgggtccagcaacggcactccgccaatctcggtgtgcttgagcaataccgagccgatcaccgtggtcagcggaatcgccaacgccgggatgaacagcttgtgccccaggcgacccgcactggcacgggatgccttgtcgtgcaactcggcatgcttgccacggccgacgccgcccatgccggcaatcaaggccatgaccactatgcctaccccgatagccaccgaaggcagacgctcaccgatcaggaatggaatggcgaacaacagccagaacaatgcactggaccaacgcttgggatgggtgcggtccatcaggatcatgcaagccgtgatcagcagcaggaccccggccagccagtacaggtattgaatggaaataatcattgtgcagcctccacggatgcagctgccggcgtcatctctcgggtgagcctgcggtcaaaccgatgcaggcggatcgcgtgaatgatgaaggcgcagatcgcggtaggaatcccccacaccgcaatatgcagcggctccacatcaatccccgaccccagcaggaaggtatgcatcaaggcgattgcaccaaaggcgacaaagatatcctcaccaaaaaacaggccgacattgtcagtcgccgcgcacatcgccagcactttatgacgcagtttgtcaggaagtttgccgtagcgtttttccgctgcaccctcagccatcggcgccagcaacggacgcaccatctgcggatgcccgcccaggctggtcaggcccatggcagccgtggattcacgcacaaacaaatagatgatcaacaaacgcccgaccgtggcgcgctcgaaccgtgcaatccagttctgcgcatgcaggcgcaacccatggcgctccaacaggccaatgaccgccagaggcagcaacagaatcaattgcagggcacgggtctgaaggaagccatcgcccatggtggcgaggattttttccaggggaaaatgggcggcaagcccggtagcgatagcggccgcggtgaccaccaacagagggttgatgcgcaaaacaaagccaaccacgatcacaagtacgccgatcaacggccataagttcacaacagtttgcatggcggtgaggtccttaagtgcgcgctgcggcgccattacagcaggatgtgaacaaagggttcacagcaggaagtggcgtgcagtcggctcggttttttattgttgacccggaaggtcgagcgtcagtggcggcaactttgctgcctggggacgggaggtgtccaacaagaaaaattgttgctgcgaaccaataaattttgtgggtgattgcacagcatgcatgtaacgagatgtggacagacccgcagggattcgcgcatcttagcgccgcctgtcttatcaggcgtgcacctcaaatcagcacactcttcccgattactgttgtggatatggaaattcaatgaaaacccaaaaggtcctgatcgccctctcctgcgcagttgcgctgtccatgctgggtggttgcgccgccaaggtaaaaagtggcggcagcgcagcgctggcgatcccggactccgcgaaacacaacctcgtggtcagcatcaagggcgaaggccaggtcgagcaaaacccggactggaacctgctcaagcgtgactggaacaacgcgctgcaagtggaggcccgccaggccggtttcaacgtcactgaaagccctgcagtggttccgagtggtgaagaaggtgtcggcatcaagatcaatgtgagcaagtttcgctacatcgagccgggctcacggtatgtagccggcgcgctggtaggtaacgcctgggtgttctcccgcgcagattactcggacctcaaatccggcacgccgattggctcgcgcacctacgacacctcgtcatccgcctgggaaggcattgcctcggccatgacgcagaagcaggtgcaggcgattgccaaacagatgatcagcgatatcaagaacgccaaagccaagtaagccgccatcgtgagcgagtttctcgaattcatctggaagctgcttgagttcgcaggcgactacaccccaccacggcgaaaacgcgtgttctcactcgggttcgtgatgtttttgctgctggtggcggttgttgaactggtgttgctgcagatttttcttggagatacgggctgaagagagggtttgcaaaagttttgcaaatcgcaggcaacaaaaaagggcccacctttcggtgagcccttctagaccgcccagcagagcggattttgtttggtaggcgcgattggactcgaaccaacgacccccaccatgtcaaggtggtgctctaaccaactgagctacgtgcctgctgtgaggcggcattctacggaattccggaggggtgtcaacatcttttttgcagctaaccctatgaatatgcgaattttttatttacgcggggcacacccgcggatttcgggtggctggcaggcaattttcaactcaggtaggatcggcgcactcgtaaaaaatataaaacagaggttccaggatggcgaacaccccctatccccagtcgtattacgccgcttccgcgaatgccgttccccctcgcccggtcctgcaaggcgaagtcgaaaccgatgtgtgcgtgatcggcgcaggctacaccggcctctccagtgcgctgttcctgctggagaacggttttcgcgtaacggtgctggaagccgccaaggtgggttttggcgcctcgggccgtaacggcgggcagatcgtcaacagctacagccgggatatcgatgtgatcgagcgcagcgttgggcccaagcaggcgcaactgctggggcagatggcgttcgagggcggcaagattatccgtgagcgcgtggccaagtatcagattcagtgcgacctgaaggacggcggtgtattcgccgcgctcaacagcaagcatatgggccacctggagtcgcagaagcgcctgtgggagcgctacggccacactcaactggagctgctggacgaacgccgtattcgcgaagtagtggcctgtgacaactacgtcggcggcctgctggacatgagcggtgggcacatccacccgctcaatctggcactcggcgaagcggccgccgtggagtccctgggcggtacgatctacgagcaatccgctgccgtgcgtatcgagcgcggcgccaacccggtggtgcataccgccgagggcaaggtcagggccaagttcatcatcgtcgcggggaatgcctacctgggcaacctagtgccggagttggccgccaagtcgatgccgtgcggcacgcaagtaatcaccaccgcccccttgggcgacgagctggcgaaaactttgctgccgcaggattactgcgtcgaagactgcaactacctgctcgactactaccgcctcaccaacgacaagcgcctgatcttcggcggcggcgtggtgtatggcgcacgcgacccggcaaacatcgaagcgatcatccgcccgaagatgctcaaggccttcccacagctcaaagacgtgaagattgactacgcttggaccggaaacttcctgctgaccctgtcgcgcttgccgcaggtaggtcgcctgggcgacaacatctactactcacagggctgcagcggccatggcgtgacgtatacgcacctggcgggcaaggtactggcggaggcactgcgaggccaggcagagcgttttgacgcgtttgccgacctgccacactacccgttcccgggcgggcaactgttgcgcacaccgtttgcggcaatgggcgcctggtactatgggctacgcgacaaattgggattctgactcgaacctgcaggagctcgtttgcgggctcctccaggttgcattatcaaatcgcagacacaaaaaaccccggtctttcgaccagggtctttgctatcggatcaaagtagccagaggcttgctttgtgctccaaggcgttcagtgggccttgaggcagatatggcgcagcggacgggactcgaacccgcgacccccggcgtgacaggccggtattctaaccgactgaactaccgctgcgtatcgcttgaccggttgatcgtaaaccctcaaccgtctttaaacatctgattgatcagccttggctgttcaatctcaagtccgacacatcgaacctggataatatggcgcagcggacgggactcgaacccgcgacccccggcgtgacaggccggtattctaaccgactgaactaccgctgcgcgtcggtgcaacctttaacgttgcgtcttgccctgaagcaaaactctcaagaagtggtgggtgatgacgggatcgaaccgccgaccctctgcttgtaaggcagatgctctcccagctgagctaatcaccctttgcttcgttgaggccgcgaaatttacgcaggtagcagacctaagtcaatagcctgcttgaagtttttctgaaaaagacaaaattgcttcaagacggctatccgccctactcgctgtaaatcatcttcttgctcatgccaccgtccacgacaaactcttgcccggtgacaaaccccgcctggcgcgacagcagccatgccaccatcgccgccacatcttccacggtccccaccctacccgccggatgctgggcgtgatcggcgtcactcaacggctcggcacgccgggccgccgggtcacgcgcatcgatccagccggggctgaccgcattgacccgcacttccggccccaggctcatcgccagggcgtgcgtcagggccagcaggccacccttgctcgccgcataggcctcggtgtccggctccgactggcgagcccgggtcgacgccaggttgacgatggcgccgccgtgggcacgcagatacggcgcacagtgcttggccaacaacatcggcccactgaggttcaccgccagcacccgattccagtacgccaggtccaggctttccagcgtgatgttacgcgggtcggccaccgccgcgttgcagaccaacgcgtccaggcgcccaaactgccccaacacctcggcaacaccctgggcgacttgcttctcgtcggccacatccatgctgataaaccaggcgttgtctcccagtaccttggacaccttggaaccgcgctcgcggtccaggtcggtcaacaccacctgccaaccttcgctgatcagccacgcggcaatcccgaggccaatgccgcgcgcagcacccgtcaccagcgcgacacgcccgttactggccgctgccgcttccatggaccactcgatcacaaggccgccagcccgcgagccaggtcagcttgcaagtcagccacgtcttccaggcctaccgcgatgcggatcaggctgtcacggatacccgctgcctcacgctcctgcggcgccaggcgaccgtgggaggtggtgctcgggtgggtaatggtggtcttgctgtcacccaggttggcagtgatggagatcaggcgtgtcgcatcgataaagcgccaggcgccctctttgccgccctttacttcaaagctaaccacagcaccgaaaccacgctgctgacgctgagccaattcgtgttgtgggtggctcttgagaccggcgtagtgcaccttctcgataccgtcctgttgctccagccactcggccagggcctgggcgttggcacaatgggccttcatgcgcaggctcagggtttccaggcctttgaggaagatccaggcgttgaacgggctcaaggtcgggccagcggtgcgcaggaagccgacaacttccttcatctgttcgctgcgccccgcaaccacaccgcccatgcagcggccctggccgtcgatgaacttggtggccgagtgcacaacgatatccgcgcccagcttcaacggctgttgcagcgccggggtgcagaagcagttgtcgaccaccagcattgcgcccttggcgtgcgccacttcggacaacgccgcgatatccaccagttcggccagtgggttggacggcgactcgacgaacagcagcctggtgttgaccttgatcgccgcatcccagccggacaggtccgccaggggcacgtagtccacttcaatgccgaagcgcttgaagtacttctcgaacaggctaatggtcgaaccgaacacgctgcgcgacaccagcacatggtcgccagcgctgcacaggctcatcaccaccgccaggatggctgccatgccggtcgccgttgcaaccgcctgctcagcgccttccagcgccgcgatacgctcttcgaacgcacgcacggtcgggttggtgtaacgcgaatagacgttgcccggcacttcgccggcaaagcgcgcagcggcatcagccgcagtacggaacacgtagctggaggtgaagaacatcggatcaccgtgctcaccttccggggtgcggtgctggccggcgcgcacagccagggtatcgaaagctacgccatcgaggtcgctgtccaaccgaccggcatcccattcctgactcatgctgccactccttactcgattctttatttaagatacaaaaccggcccctcagggccggttgtcactcagttgttgtacaggtcgatgatcgcgctgaccgcctgggtcttgatcttcgacgagtcgttgcgcgcctgctcgatcttgttcaggtaggcctcgtcaacgtcgccggtcacgtacttgccgtcgaataccgcgcagtcgaactgctcgatcttgatcttgccaccgccgaccgcctcgatcaggtctggcaggtcctggtagatcaaccagtcggcgccgatcaggtcggccacgtcctgtgtcgaacggttgtgcgcgatcagctcgtgggcgctcggcatgtcgatgccgtacacgttcgggtaacgcacggcaggcgctgcggaacagaagtagacgttcttcgcaccggcttcgcgggccatctggatgatctgcttgcaggtggtgccacgcacgatggagtcatccaccagcatcacgttcttgccgcggaactccagctcgatggcgttgagcttctggcgtaccgacttcttgcgcgccgcctggcccggcatgatgaacgtgcggccaatgtagcggttcttcacgaagccttcgcggaacttgacgcccaggtggttggccagctccagcgcagcggtacggctggtgtccgggatcgggatcaccacgtcgatatcatgctcgggacgctcgcgcaggatcttctcggccagcttctcgcccatgcgcaggcgtgccttgtagaccgaaacgccgtcgatgatcgaatccggacgcgccaggtagacgtgttcgaagatgcacggggtgagtttcggtgccacagcgcactggcgggtgtgcagcttgccgtcttcggtgatgtacaccgcttcgcccggcgcgaggtcgcggatcagggtaaagcccagcacgtccagggacacgctttcggaagcgatcatgtactcgacgccttcgtcggtgtgacgctggccgaacacgatcgggcgaatgccgtgcgggtcacggaaaccgacgatgccatagccggtgaccatggccactaccgcgtaaccaccgacgcaacggttatgcacgtcagtcacggcggcaaatacgtcttcttcggtcggctgcagcttgccgcgctgggccagctcgtgggcgaacacgttgagcagcacttccgagtcggagctggtgttgacgtggcgcaggtcagattcgtaaatctccttggccagttgttcaacgttggtcaggttgccgttgtgcgccagggtaatgccgtaaggcgagttgacgtagaacggttgagcttcggccgaagtcgagctaccggcagtcggataacgcacatggccaatacccatgtgcccgaccaggcgctgcatgtgacgctgatggaacacgtcacgtaccaggccattgtccttgcgcaggaataaccggccgtcgtggctggtcacaataccggcagcgtcctggccgcggtgctggaggacggttagcgcgtcatacagcgcctgattgacgttcgacttaccgacgataccgacgatgccacacatgcgacgcaacccctacttaatgaatcttgactgaacacaacttactgaggcgttttggccggcaagaggtgttccttgaacggaagatcagcgggtacgctgattccgctggccagccactgactgctccaccccagaatgaggttcttggaccagtctgcaaccaatagaaattttggcacgagtaccgactcctgccaccacgaatcctgctgtaccggccccaggctcaacagcccgaccgccacgaccaccagcaacgcgccacgcgcggcaccgaaggccatgccgagaaatcgatcggtcccggagaggccggtgacacgtatcaactcgccaataagataattgaccattgcccccaccagcagcgtggcgatgaacatgatggcgcagcccgcgatgacgcgagccgaaggtgtctcgatgtatccagccaggtagaccgacaatgaaccaccgaacatccaggctacgactcctgcgatgatccaagtcagcaacgacagtgcttccttaacgaagccgcggcttagactgatcaaagcggagatggcgacgattgcaacaatcgcccaatcaacccaggtaaatggcacgttgtagcctacggacagatgaggcggcgcattttagcagagcgtcgggctgtcggtaagctgtgattgtggctgccttgcaaatcagtagtttgggacgagtgaatccaatttcaagcacaccccgaaacaactgtgggaggggtaatccccctcccacacttgaccgcatttcaaactcaagccgctgcgaaatcaaccgcgctcaggctggaaccgggtcacgaaacccttgaggttctgctggcgatccagcaaatcgcgcaggcgatccgcctcggcacgctcgatcagcggcccgataaacacccggttcttgccatcggcactacggatataggcattgtagccttggctacgcagcttcttctgcaacgcgtcggccccctcgcggttacccagactggccacctggatcgaccaactgaccggcaagccattcggatcgatgcggctctggccgacgtccggcttgcctggcgcggcaggctgcggcgcaaccggcttgggcgcaggtgcgggcgcagcaggcttggccgctacagtcggcgcaggcgccggcttcaccaccggcacacttggctgtaccggcatcgacggtgcctgctgtgcagccacctcatcattggtcggcacgggctcgtcctcgggtaacgcctggggctcaggcaccaccaccggctgaacctgcacctgaggcactgcaggcgcctgcggcgaggccggtgcctcgacaacgacctgacgctcttcatcctggcgggaaaacagcatcggcaggaagatcaccgccaatgccaccagcaccagggcaccgaccattcgctgcttgtatgcgctatccagtaatgccatgtgcagcttcctccgtggagcgccgggccaaccactcaagcgcctcggcaacacaataaaatgacccgaacaacagaatctcatcgtcgggcgtggcaatggcgcactgtgcttcaagggcatcggtgacgcttgcatacgacgtcacgggcgcagcaaggttctgcaaggccacttccagctcggcggccgggcggctgcgcggcgtatccagcggcgcaacagcccaggcctggacacgacccagcaagggcgcgaccacaccgtccaggtccttgtcggccagcaggccgaatacggcaaggcgttggccgaccggcggcgtgcgtgataggcgttgcgccaggtactcggccgcatgggggttatgccccacatccagcagcaggttcagccgcttgccctgccattcgaattcacgacggtccagacgtccgacgacgcgagtcgccagcaaggtggccgagatctgctcgacattccacggcagatccagcagcagataggcttgcagcgcgagcgcggcgttttccatcggcaggttcagcaacggcaaatcgcgcagttctacggcctggccacgcgcatcgcgcccacaccattgccagtgctgatcaccgatctcaaggttgaattcgcggccccgcaggaaaaacgggcaatccagctcacgcaccttgtccagcaaggtgtacggcgggtcaatgtcaccacacagcgcaggcttgccctggcggaagatcccggccttttcataggccacggactcacgggtattgcccaggtagtcggcgtgatccaccccaatactggtgaccaacgccaaatcggcgtccaccacgttgaccgtgtccaggcgcccacccaggccgacttcaagtaccaccacatccagttgcgcacgctcgaacagccagaacgccgccagggtgcccatctcgaagtaagtcagggagatctcgccccggcccgcatcgagtgcggcgaaggcttcgcagagttgctcgtcggtggcttcgacaccattgagctgcacccgctcgttgtaacgcagcaggtgcggggaattatagacgccgactttcagcccctgggcctgcagcagcgccgcgacaaaggcgcaggtagagcctttgccgttggtaccggtcaccgtgatcacgcgcggcgccgggcggcccaacccgaggcgggccgctacctgttgcgagcgctccaggcccatgtcgatggcggacggatgcaactgctcaaggtaggcgagccattcgcccagggtacgttgggtcataggtttgcaggcaccggcggtacgacgatcggctcgactttaggcgcgacgtacaccggggtcggcaggcccatcatttgcgccagcaggttacccaggcgtggacgcaactcaccgcgcgggatgatcaggtcgatcgcgccgtgctccagcaggaactcgctacgctggaaaccttccggcagtttttcacgcacggtctgctcgatcacgcgaggaccggcaaagccgatcagcgccttgggctcgccgacgatcacatcacccagcatggccaggctggcggatacgccaccgtagaccgggtcggtcagcacggagatgaacgggatgccttcttcacgcagacgcgccagcaccgcagaggtcttggccatttgcatcagggagatcagggcttcctgcatgcgcgcaccaccggaggcagcgaagcagatcatcgggcagcggttttccagcgcgtagttggcggcgcgaacaaagcgctcaccgacaatggcacccatggagccgcccatgaaggagaactcgaacgccgacaccacgactggcatgcccagcaatttgccgctgacggagatcagcgcgtctttctcaccggtctgcttctgcgcggcaaccaggcggtccttgtacttcttgccatcgcggaacttcagacggtcaaccggctccaggtcggcgcccagttcgttacggccttcggcgtccaggaagatgtcgatgcgggcgcgggcgccgatacgcatgtggtggttgcacttggggcaaacgtccagggtcttttccagctccgggcggtacaacaccgcgtcgcaggatgggcacttatgccacagaccttcaggaaccgagcttttcttcacctcggaacgcatgatcgaagggatcagtttgtctactaaccagttgctcatgctttctttctccagtaccggtggcttgaacacagccccgcgtatgcccttgagctaaattcatatgtggcgatgacacaggctggacggggtcagacgttcgaccggccttttcctgcctgtatcctcagccttccagacaacctgccagcgcagggttgccacttcgtttccgggccaccacaggcggcgccgggctgttttacacagtggtagttatggacggcggcagactgccagccgtcacattgcaccactgctgttgcgcacggcctgcatgaatgcgcgaatcttgctgtgatccttgatgcccttgccctgctccaccccgccgctgacatccacggcatacggccgcacctgctcgattgccgccccgacattcgcggggttgagcccgccggccaggatgatcggcttgctcaagccagcgggaatcagcgaccagtcgaacgcttcgccggtaccgccgggtacgccttcgacataggtgtccagcagaatcccgcgagcaccaccgtaggcggcacacgccgccgcgatatcatccccggccttgacgcgcagcgccttgatgtagggacgctgataactttcacattcgtcaggcgtttcgtcgccgtggaactgcaacatgtccaagggtacggcatccagggtttcgttgagttcgcagcggctggcgtcgacgaacaaacccacggtggtcacgaatggcggcaaagccgcgatgatcgcccgcgcctgcaccacattcaccgcccgcgggctcttggcataaaacacgaaaccgatggcatccgcccctgcctcgaccgccgccagcgcgtcttctatgcgggtaatcccgcaaatcttgctgcgaacggctgacatgtcgtgaaaactccagggttggaccgagaaagtcccggatggtaacaaaagctattccgggcgtcagccgccaagttcgctgaaacctgtgaggaagtgtggcccgatgaagcgctccggcaactcgaactcgtcgcggtactccacatccaccaggtacaggccgaacggatgtgccgtgaccccacccgtgcgacgaacgcggctttccagcacttccttggcccactccaccgggcgctcgccggtaccaatggtcatcagcaccccggcgatgttgcgcaccatgtgatgcaggaaggccccggcgcggatatccagcacgatcatcttgccgtggcgggttacccgcaggtggtggacttccttgatcggcgacttggcctggcactggccggcacggaaggcgctgaaatcatgcacacccaccaggtgctgcgcggcctcggccatgcgctcggcatccagcgggcggtggttccaggtgatttcttcgttgaggtgcgccgggcggatctggtcgttgtagatcacatagcgatagcgccgggcgatggccttgaaacgcgcatgaaagtgcgctggcatgaccttggcccaactgacgctgacgtcatggggcaaattgatattggcgcccatcacccaggccttcattgaccgctcagcctgagtatcgaagtgcaccacctggccacacgcatgcacaccggcgtcggtacgcccggcgcacatcagcgaaaccggtgaattggcgactttcgacagggcattttccagggtttcctgcaccgtcagcacgccggatgcctggcgctgccagccgcgatagcgcgagcccttgtattccacgcccaaggcgatgcggtaaaagcctgcggccgccatttcggcggtcgggttatctatatttgccaagaactgagagcctgatgagttgcgcaaaggcggccattatgccggtttgcaggggagcccacaaaagcaaaacggcgacccgaaggtcgccgctgtttgaacaacgggctgttacgccaaccggccgagcatttccttggcctcgccgcgttgaacctcatcgccttcggtcaacacttcggaaaggatatcccgcgcgccgtccgcatcccccatgtcgatataggcctgggcgaggtcgagcttggtggccacctcatccgtgccggagaggaagtcgaattccggctcatcatcgcccagcgccgcgtcttctgcggtaaaggacggctcaatggacggatgctccaggctctgggacaggcgatccagctcggcgttgacatcatccagctccgacgtgaaagcatcgggcttggcggcggcttccggctcatcagccagggacaggtcgaaatcttccggcaaatcgaagtcatccagcgccgcaggcgtgagggtcggcggctcgacggccggcacgtccttcatctgttcgtccaggcccgaaaggaagtcgtcatcggattgcgccgaagccggggcatccagttgcaggtccagatcgaagtccgacaggtcatccgggctggccttggcttcggtctgctgctgcagcagcgactcgaacgtctgctgatcgcccttgacctcggccggggacgcctgctcaagctcgtcgaggctcagatcgaaatcagtgtcaaagacctccggctgcgcaggcgcaggtttgtcttcgagcaaatccttgacgtactgagcgtccagggcagctgcagccacggcggcgctgacacccgccgccaacaccgccatggccgggaagcgactcttgagctgttcgacctgggcatggttttcaccattggccaccagttgacgctcctgggtcacaaagccgtccttgtcgttttgcaggccgtagacttccatcagcttcaagcgcaggtcgctgcgcttgggctcatgcttgatcgcttgctccagtacgtcggctgcctggttcaggtgaccacggtcgatatgggactgggcttgggccagcgcatcgtttgagttcaccggagccacggcaaccgccagcggcgccagtacggaagcaacggtcggcacaacaaccgccggttcaaccaccggagccggggccggtgcggcggccagctttacgctgggcggcggcgtctccagaccttcgaagctgctcggcggcaggtcgtcatggaggttcgaggtgaactccggttcttcagccagggcccgcgccatgcgcaggtgtttttcctcttcgcggcgcgcattgcgatggcgcgcccacaacagcaggagcaacaacaccagtaaacccgccgcaccgccgatcacgccgagcacgatcgggttggtgagcaggtcattgaatttgccgtcggcgctggccggtgccgcgtccgccttgaccggctcaggcgctggcgcgacgggtgcaggggtgacggcctcgggcgtagcaggtgcagtggatggctcgcctgccaactgggcaggcattgctgcagtcgccggagcagccgggacacccttttcagcctgcaaacgcgccagttgatcgtttttcagttgaatcagtttttgcagcttgtccaactggctttgcaggtctgccgcgcggcttttcagctcttcgttgtcgcgtcgggtggtgtccagttgctcctgggtcatcgccaacttgtcgctgagtgccgcgctgtcgcccgccttgcccttggcgcccttcttggcggcttcggccgacaccaggctcaagttgtccttggcgttggtgcttgcaggcgcgttgcctgcctgggtgcgcttggtggcgtccagttgctgtttgcccgctgccgggttggtggcggcgcgtcgaccctggcgccaggcggcattttgcgcgctcacctcagcaattgcctggggttgcggcagcgcagtgctttgtacggcgtccggcaggcgcaggacctggccggttttcagacggttgatattgccgtcgatgaacgcattcgggttcagcgcctggatcgccagcatggtttgctgcacggagccaccattgcggtgcttctcggcgatttcccagagggtgtcgcgggacgtggtggtgtgctgtgccggtttgctcgcggcaggcgcggtgctggccggtgcggccagacgcggcgcaggcgcggcggtcgtcggtgccggctggtcgaacttggccgggtcgagcaacacgctgtagtcacgcatcagacggccattcggccattgcacctgcaacaggaaacgtacgtaggagtccggcaacggcttgctggaggtaacacgcaccacgctgcggccattggggttgatcaccggggtgaacgtcaggtcactgagaaacgcctggcgatcgacgccggcgtccacaaatgcctggtcagaagccaggcttggcgtgatctcggtagcggtgaggccaccgacatcgagcaattcgatttccaccgccaacggctggttcaacttcgacttgagggtcatctcccccagctgcagcgcctgcgccataccggaggacagcgccgaggcggccgctattgctaacaccagtttgcgaacttgaaccatagcctcatcctttgtttgaacactccccggcctgcgagaaggttggtaaccgctgccataaggcatggcgagccgataggtcaccgacgcgcaacttttcctgcctggggccaagcatagcgcctggctagaatcaatctacaaattgccgccaagtatcttttacgcaaggccttttatcaacaactgcgccagctgtactgcattcagtgcggcgcctttgcgtacgttatctgacgtcagccacagatttagttccgccgggtcatccacacctgcccggacgcgaccgacgtagaccacatcctggcccactgcatcgccgacggctgtaggaaaatccccttcatctacgagctcgatgctcggcgcagcctcaagtgcgcggttcaccgcagccagatcgaccgccgcgcccagttgcaaggacactgtcaggctatcgccaaaaaacaccggggcttgaacgcaggttgcggaaatctttagcaaaggtaattccagcactgcgcgcaactcgtggaccaggcgtttttccagggccgtatgcccctgagcatctggcgtgccaacctgcgccaacaggttgaaggcgacctgccgatcaaagaacttcggctccagcgggcgcatattcagcagctcggcggtttgccgggccagttcgctgacggcttcacgcccctgggccgacatcgccaggctggcggtgacgctcacccgctggatatccagcaagccccgcaaaggcgccagcaccaccgccaggttggtcgccgacgggctcgggctgccgagctggaacggcttcttcagaccttccagcacgtgggcattggcctccggcaccacctgcggcgcctgctcggccggcaacgcaccggataagtcgatcaccgagcaccccgccgccgtggcacgcggcgcaaaactcagggtgacagccggccccgccgcaaagaacgccagctgcgccttgctgaagtcaaattcgtcgacttccttgacccgcacattcttgccgcgaaagggcacggaggcgccggccgagttgttgcccgccagcaaatacagggtgcctaccggaaaatccagctcttcgaggatctgcaccagggtttcaccgacggtgccggtggcgccgatcacggcgatttcaaaggtctgggtcatgggggctgcctcgggcattgcggggggagcggcactttaccgggtgactgggggtgaggcaattaagctgggatttgtggtggggctgatggccttatcgggggcaagccccctcccacactcgaacgggttcacaggtcaaaatgtgggagggggcttgcccccgatgaagcccgaccaaacaacaaaaaacccgcgcctgtcatcagaacgcgggtttctctcattgccttacgcgatcaacgctccagcaaaatccgcaacatgcgacgcaacggctcggccgcgccccacagcagctggtcgcccacggtgaatgcaccgaggaactggctgcccatgttcaatttgcgcagacggcccaccggcacattcagggtgccggtgaccttggtcgggctcagctcctgcatgctgatatcacggttgttcggcaccagcttgacccaggggttgtgctggctgatcaaggcttcgatatcgctgatcggcacgtctttgttcagcttgatggtcaacgcctggctgtggcagcgcatcgcgccgatacgcacgcagatgccgtcaaccgggatcgggctcttgaagcggccgaggatcttgttggtctcggcctgggccttccactcttcgcggctctggccgttcggcagttccttgtcgatccatgggatcaggctaccggccaacggcacgccgaagttttcggtcgggtaggcatcgctgcgcatggcttcggccacgcggcggtcgatgtcgaggatcgcgctggccgggtcggccagttgatcggcgaccgcggcgtgggtcgcacccatctgcttgatcagctcacgcatgttctgcgcgccggccccagaggccgcctgataggtcatggcactcatccactcgaccaggccagcttcgaacaagccgcccaggcccatcagcatcaggctgacggtgcagttgccgccgacgtagttcttggtaccggcatccaactgctggtcgatgaccttgcggttgaccgggtcgaggatgatcaccgcgtcatcctgcatgcgcaggctcgacgcggcgtcgatccagtagccctgccagccggcttcgcgcagcttggggaagacttcgctggtgtagtcgccaccctgacaggtcagaatcacgtcgagggttttcagctcttcaatgttgtaggcgtccttgagcggagcaatatccttgcccacggacggcccctggccacccacattcgaagtggtgaaaaacaccggctcaataagatcgaaatcctgctcttccagcatccgctgcatgagcacggaaccgaccataccgcgccaaccgatcagacctacacgtttcatcgcaactacaccttgttaaaaagtgggccgccttgcagcaacaactgcaagcgggcccgagagattacagattccgcagcgcggcgactactgcgtcgcccatttcttgcgtaccgaccttggtgcaaccctgcgaccagatgtcgccggtgcgcaaaccctgatccagcaccaggctcacggcctgctcgatggcatccgccgcatcgctcaaattgaagctgtaacgcagcatcatcgacaccgacaaaatggtcgccagcgggttggcaatgccctggcccgcgatgtccggcgccgaaccgtggcacggctcgtacatgcccttgttattggtgtccagggacgccgacggcagcatgccgatggaaccggtgagcatcgacgcctggtcggacaggatgtcgccgaacaggttgtcggtgacgatcacgtcgaactgcttcggcgcgcgcaccagctgcatggcggcgttgtcgacgtacatgtggctcagttcgacgtcggggtagtccttggccacttcctcgacgatttcgcgccacagctggctggaggccagcacgttggctttatccaccgagcagaccttcttgccacgcacgcgggccatgtcgaagccgacacgggcgatacggcggatttcgctctcgctgtacggcaaggtgtcgtaggcctggcgctcgccattttccagctcgcgtacaccgcgtggcgagccgaagtagataccgccggtcagctcacgcacgatcaggatatccaggcccgccaccacttccggcttgaggctcgaggcgtcggccagttgcgggtagaggatcgccgggcgcaggttgccgaacaggctcagttgcgcgcggattttcagcaggccgcgctcagggcggatgtcacgttcgatcttgtcccacttcgggccacccactgcgccgagcagcacggcgtcggccgcgcgggcgcggtccagggtctcgtcggccagcggtacgccgtgcttgtcgatggcggcgccgccgatcacgtcgtggctcagttcaaagcccaggctgtacttgctgttggccagttccagcaccttgaccgcttcggccatgatttccggaccaatgccgtcgccagggagaatcagaatctgcttgctcatgggttcctcatttcatcaagcgacccgcccgtgggcaggtcgggaaaaatcaatcagcgttcggcaaacaccaccagcacgtcggtgctgaaggtgccgtcggcttgaatttcgtaataatcacgcacttcctggcccatcgccttttgcagctcaaggatcgcggcgcgcaggacctgcggcgtgcgcatgcgctcgacccacgaggtgtattccaggcgcaggcgctggcgactgctggtgcgcacatgcaggccggactcgctgagctgctgcatccactcggcggcggcgtagtcgcgcacgtggctggtgtcgcgcagcacttcgacggtttgcaggtaagtgtccaacagcgggctgcccggtgacaagacatccacgaaagccgccacaccacccggcttgagcacccgacgcacttcacgcaaggccaggccgaggtcgctccagtggtgggccgagtagcggctgaacacgaagtcgaactcgccatcggcgaacggcaggcgctcagcggcgccgttcacggtgcggatgttgtccaggccacggtccgtggcagcggcggcgaccacgtcgagcatctgttgggacaggtcgtaggcgaccacttccttgaccagtggcgcaacgtggaagctgacatgaccggcaccgcagcccaggtccagcagtcgcgcaccgccctgcccggccagttcggcctggagcagcgcgaattcggtgccctgggcgtgcacggcactgctcaggtaggcggaggcttgctcgccgaattgtttttgcacgacttgggtgtgggcggtggtggtcatggtggtttccttgggttttggggtgttggtactggcgctatcgcaggcaagccagctcccacagttggaatgcattccaatgtgggagtcgggcttgcccgcgatggggcccgcacggttaccgccaatcaggcatcgcgaaacaaccaaggctggctcgcccggtgcctggcttcaaacgcggcaatcgcatcgccgtcctgcaaggtcaggccgatatcgtccaggccattgatcaggcaatgcttgcggaaggcatccacctcaaagtggtacaccttgccatctgggcgggtcacggtctgcgcggccaggtcgacggtcagttggtagccctcttcggcctcaacctgcttgaacagctcgtccacttcggcatcgctcaagatgatcggcagcaagccgttcttgaagctgttgttgaagaagatgtcggcgtagctcggcgcgatgatgctgcgaaagccatactcttccagagcccatggcgcgtgttcacggctggaaccgcagccgaagttttcccgggccagcaagacgctggcgccctggtaacgctcggcattgagcacgaagtccttgttcagcgggcgcttggagttgtcctggtaggcgtagcccacgtccaggtagcgccactcgtcgaacaggttcgggccgaagccggtgcgcttgatcgatttcaagaactgcttggggatgatctggtcggtgtcgacgttggcgcgatccaaaggggcgacaaggccggtgtgttgggtaaaagcacgcatcgggtaatcctcagatcaattcgcgaacgtcgatgaaacgaccgttgacggcagccgcagcggccatggccgggctgaccaggtgggtacgcccaccggcgccctggcgcccttcgaagttacggttggaggtggacgcgcaatgctcacccgactccaggcggtccgggttcatcgccaggcacatcgagcagcccggctcacgccattcaaaaccggcttcgaggaagatcttgtccaggccttcggcttcagcctgcgctttgaccaggcccgagcccggcaccacgatggcttgcttgatggtcgaagccactttgcgacccttggcgatcaccgccgcggcgcgcaggtcttcgatccgcgagttggtgcaggaaccgatgaacacgcgatccaactggatgtcggtaatcgcctggttggctttcaagcccatgtacttcaaggcgcgttcgatggaaccacgcttgaccaggtcggcctcctgagccgggtccggcacgttctggtcgacggccaggaccatctccggcgaagtgccccagctgacttgcggcttgatctgggcagcgtcgagctcgaccacggtgtcgaacaccgcatcggcgtcggagaccaggtctttccaggcttcgacagcggcgtcccaatccttgccttgtggggcaaatggacggcccttgacgtattcaacggtcttttcgtccgccgccaccatgcccacgcgggcgccggcttcgatggacatgttgcagatggtcatgcggccttcgatggacaggtcgcgaatcgcgctgccggcgaactcgatggcatggccgttaccgccggcggtgccgatcttgccgatcacagcgagcacgatgtccttggcggtcacgccgaacggcaactggccttcgactttaaccaacatgttcttcatcttcttggcgaccaggcactgtgtggcgaacacatgttccacctcggaggtgccgatgccgtgggccagggcgccgaacgcaccgtgggtggaggtgtgggagtcgccgcagaccacggtcatgcccggcaaggtggcgccctgctccgggccgatcacgtgcacgatgccttgacgcacgtcattcatcttgaattcggtgatgccatattcgtcgcagtagtcgtcgagggtctgtacctgcaaacgcgacacctggtcggcaatggcttcgatgccgcccttgcgctcaggggtggtcggtacgttgtggtccggggtggcgatgatggagtcgacgcgccaaggcttgcgcccggccagccgcaggccttcgaacgcttggggcgaggtcacttcatggatgatgtgacggtcgatatagatcagcgacgaaccatcgtcgcgccgtttcacttcatgggaatcccaaagcttgtcgtaaagcgttttgccggccatcagtcggtcctcatcagcggtgtttctctatgccgggcttttcaataaccctttggcttgtgaggctgatggtatggcgctacattaaataactcaaattcatattttttatgctttggattaccaactggaatacaaccatggacctggccaacctcaatgcttttatcgccatcgccgagaccggtagcttctcgggcgccggtgaacgcctgcacctgacccagccagccatcagcaaacgcattgccggcctggagcaacagttgaaggtgcgtttgttcgaccgcctgggccgcgaagtcggcctgaccgaggccggacgggccttgctgccacgcgcctatcagatcctcaacgtgctggacgacacccgccgcgccctcaccaacctgaccggcgaagtcagcgggcgcctgaccctggccaccagccaccatatcggcctgcatcgtttaccgccggtgctgcgcgcattcacccgggaatacccgaatgtggcgctggatattcagttcctcgattcggaagtggcctacgaagaaatcctccacggccgcgccgaagtggcggtgatcaccctggcacccgatccccacaatctggtgcgcgccaccccggtgtgggacgacccgctggatttcgtggtggcgccggagcacagcctgatcagcaacggccacgtcagcctggccgatattgccgggcacccggcggtgttccccggcggcaacaccttcacccaccatattgtcagccggctgttcgaggcccagggcctcacgccaaatatcgcgatgagcactaactacctggaaacgatcaagatgatggtgtcgatcggcctggcctggagcgtcctgccgcgcaccatgctcgatgatcaggtggcaagtatcgctttgccgggcatacaactcagtcgccagctaggctatatcgtgcacaccgaaaggacgctgtcgaatgctgcgcgggctttcatgagcctattggatgcacaggtcgatctgccagggataccggcatgaaaccgtgcggcctccaggtctgaactgaaccgcgccttacgcccatcgagccaaggccctttgataatgcgcaaccccgtcgactccgtgccacccctgccccgcatttacgccctggaccctcaagaggcggaacaaagctgggacagtgccccgcaactgctggccgcgctcaatgctgcccggctgggcgcctggtgctgggaaatcgacaccggcaggataagctggtcgcggggcacccaggcgctgttcggctttgacccgcgccagccactgcccaaggacctggactacctcgacctgctcgcgccacaggatcgtgcccgcgtggtgcgggcctttcacgcggtattggccggcgagccgttcgaacaggcgatgcatcactatatccagtggccggacggcacccaccactggctggaaatcaatggcagcctggcacctgacaaagccgggcggcggcgcatgatcggggtgatccgcgagaccacccgccagcgcgaacgggagcacgccctcagccactcggaaaaacgcttcgccacgctgtttcacctgtgccccaacatggtcttgctgacgcgccagtccgacggattgatcagcgaggccaaccagtatttcgagatgctcttcggctggccggtcgccgatgccatcggccgcaccaccctggacctgggcctgtggcgccatccggaacagcgtgcgcaactggtcaaggcgacccagcgcaaaggcctgcccatcaccatggaggtgcagttctgcgccagcaacggccagatccacgacggcaccctcagcgcacaaaaggtggagttggacggcgaggcttacctgctcagcacgttcctggataccacagagcgcaaaatagccgagcaggccctcaaggacagccaggaacgcctcgacctggccctggactcggcgcaactgggcacctgggactggcacatccccaccggcatgctctacggctcagcccgcgccgcccaattgcatggcctgccgccggagccgttccatgagttcttcgacgccttctttgacggaatgcccaatgacgagcgcgagagcatgcgcaacgcttatcgcaccctgcgcgaaggcccggccggcaactatcagctgacgtatcgcgtgcccatggaagacggcagctcacgctacctcgaaagccgcgcccgcctgtaccgtgatgagcacggcgcgccgctgcgtatggccggcactctgctggatatcaccgaccaagtggaacgcgaacaacgcctgaccgcctccgaagagaaatttgccagcctgttccaggccagcccggacccgatctgcgttacctgcctggagggcggcgcgtttatcgaaatcaaccccgcgtttacccagacctttggctggacggctgccgaggtcatcgacaaaagtgccgagcagatcggcctatgggacgagtcgagcaagcgcctgcagcgtatcgagcggatgatccgcgagcaggcattgaacaatgtggcgatcgtggtgcatcacaaaagcggccaaagcctgacctgcgtgatttccagccgcctgatcaaggtgggcgaccagccgtgcatcgtcaccacgctacgcgatatcacccagcagcagcgctcggaagcggcgctcaaggccagcgaagagaaattcgccaaggccttccattccagccccgatgccatttccatcactgagcgcgacaccggtcgatatgtggaggtcaatgacggcttctgccgcctgaccggttatcgcgccgaggaagccatcggcctgacgctgtatcagatcggcatctgggccgatgaaaaccagcgcgccgcgctgctggccgagttgcagatcaagggccgcattcatcatctggaaatgctctggcacaacaagcgcggcgagttgctggcggtggaagtctcggtggagcccatcaccctgaatgaaaccccgtgcctgttgctgaccgcccgcgacgtgagcctgctgaaaaatgcccaggcgcagatccgccacctggcctatcacgacccgctgaccaacctgcccaaccgcgccctgctgatggaccgcctgagccagcagatcgccctgctcaagcggcataacttgcgtggcgcactgctgtttcttgacctcgaccacttcaagcacatcaacgactccctcggtcatccagtgggcgacaccgtgttgaagattgtcaccgcgcgcctggaagccagcgtgcgcatggaagacaccgtggcgcgcctggggggggatgagtttgtggtgctgctcagcggcctggaagggtcacgcatggaagtcagcggccaggtgcaggcgttggctgacaccttgcgtgaattgctctcggagccgatgttcctggacggtcatcgcctgcaggtcacgccaagcatcggcgtggcactgattcccgatcacggctccacgccggcggacttgctcaagcgtgccgatatcgccctgtatcgcgcaaaggattcggggcgcaacaccacgcagatgtttcacaacagcatgcaaaaaaccgccagcgaacgcctgcgcatggagacagacttgcgcctggccttgtcacgtggcgagttcagtgtgcattaccaaccccaggtggacgcgcgcggcaacaagatcgtcggcgccgaggccctggtgcgctggcaacacccgcaactgggcgcgcagtcgccttccgaattcatcaaggtgctggaagacagcggcctgatccttgaggtgggcacctggatcctggatgaagcctgcgcggcctttcaacagctgatccacgaaggcttggtagacccactgaatttcagcctgtgcgtgaacatcagcccccggcagtttcgccagaacgacttcgtggagcgggtggagcgcagcctcaagcaacaccagttgccgttcagcctgttgaaactggaaatcaccgaaggcatcgtgatccagaacctggatgacaccatcagcaaaatgcgccgcctgaaaaagctcggcgtgagctttgcgatggacgacttcggcactggctattcatcgctcacctacctcaagcggctgccagtggatgcgctgaagatcgaccagtcctttgtgcgcgacgcgacccatgaccccaacgacgctgaaatcatccgcgccattgtggccatggcccgcagtttgaatctggaggtgattgccgaaggcgtggagaccccggagcaactggcgttcctgcaaaaactgggctgccatttgttccagggttatttgcatagccgacccttgccgatcgaggggttccggcaactgctgaggtagccctcacaccagtttcaatgcccacattgctctatcggaccaccccgatgacgtcaagccgagcttttggccgtacatgtccaccgagccgtttaatgccagcaccgaatgcgtatcgtcagcgagagtaccaatggcgccgccggccaactcttgcgcactgctctgccgcacatgggcaatcaaccccagcctgcgcaacgcctggcctggcgcttctccgtcattcaacgagtgcatggcatcctcaaaactgcgaccggcacgcatgtcgttgttctccagttgcgcacgcttggcgctcacggcgtacaaaaagttggcatcgtccttgagcgccaggtcagaaccggccaggtttgacccctgctcggccttgcgccgctcttcatggctcagaaacagcttgaagccatcgcgcatgatcacgtcaaaaccacccggtacagcgctgatgtttttgtaaatacccgcaggattctgaccaaatttcatcattgcggccttgatcgccgatatcgtgacgcaattgccctcggcaccttgataaaagccgccccatatatccttcggtttcataccgactggcatctgtgaaacaaccgtgtcattgctgaagggcgaaaccgtttcgggccggggtttgtcgttgaacaggcggtagccgtagcctcggccaacacggcgcctttcggtgtagtcgtgcacgacgccaccgaggacaaacgcactgcctcggctatgcgtctccagcactcccgccaccccatccccgaccatctgatgagccgaaacatattgcgacagcccgtacaagcccatgccccgcaggcaccgcagggtcgtctcaccctgcaaggtatcagccaaggcgccgtcgaaactgtgatagccgcccgtaatctgcttgcgcttgacataggcggcaagcgcgacgttggcgctgtcaacggcgccactgtccgcaccggtgaagcgggaagcgcgccttgtctgttcgagttcatgttgggaaatcaccaccttgaactcgtctttcatggtgatggcgtacccccccgcaaccggcgtgaattgggtaaacatgtctttcgggcttgacccaaaggttgccatcatcatcttgatgaccgccgcatgggtgctggtatcaaaattctcgccaaaatgacgccgagaagcttcaaaaccgacgccctttgcggtcggtttggcaaccgcctgtcccgtagcgtgggtaacgtgcctgtagtccggtgaactccaccagccgacaggaggagcaaagacagcaaaggtcataaaccctccgaaaccaaattgaatgagtgaaaaaacgctgcccccaaccagccctccccaatcgcacctgtgatcggggaggctggatccctcatcaagcttttaagacgagccggctgacatcaagactcgtctgcacctcaggcccttaccccttccaatcgaggattcatgaccctgcggaggacggtgggggttttcacttctacagttggctctgcatcaaccttgtccgaaggttgtggccctggagtggccggcgtctggaccttcggctctgcaccgactgctacctcagccttttgctccccgttcgactcgccattcaccttgggttcagtatccgctatcgcctctgccttcgactgagaaatggtctttacttccgcgtccggctgcgtatccagcgccacgcgcgtcgactgcctcgggataatgtcacggatttttactggttggttctccccccacccctctgaactaatccgcacgttgacaccggcctccacgcgtaccctgaactgtttaccttcctcagctgtaacgctcacttgcgtactgccatctggcataacctgcacctgggcatcaccacccgacgtacccacctgtgcgtcaccgccaactttcccctgaacgctatttccgacagtctccgccgacgaacgattgctaaaacccgtgattttcatctgcgcgccgccactcgcgtcggccttgacattaccgtccttgccggttgtcactgtggtcgatttattattatcgtcagcagtcttcacttgcatggaggtatctgcaccgacgcttacattgccgtccttgcccacagtaactgttgccgttttattgtcgccggtggctttaacttgcacagagccgtcagcaccaatactgactttagcgtccttatccgcagtaactgtcgagatattattatcgctagcagtcttcacttgcgtggagccatctgcattgatactcacactcgcaataccaccggagaaccgttcactgttcttggcaaaaggtaacggcttccctttggaattcaccccgccctccacagacacttcaataccactctccgtcattgcggtatgcggaactactgttgcggcttgagaactgaatgccctgccggacaagaggctgcgcatggccttgaagaccagatcaaacatctcaaataatttttccagcgcatcagagttaacggaaatctcctttgctcccgtcaaaggttgattaacgtctcgggcagcccctttaataccgagatccgtagcgagcgtgctcacgcgctcaacatctttcagaagaccagtagaacgttggcttgccgattggagttccggaacaaaagccttaggagtgccaagcgatacattggacatcttgtaacctcatgattagttatgtgctgcctcgaagcatttagaaactcggacagcaattaatataaaactggaaacaatcatcatctcgcagtccctattttcgtggaccaaaacacgatcaagttccaataatccaacttcacataaggcaaacaaaattgaaaatcagattttagcctatggctgtttgaggaaacgctctacacccactgcgccagcgaacgccgcatggacaaacaaggtaacaaccaagcccaaatcaaaaacaatgaaaccattaacccccaacaaaacccaacacttatgctaattgcgcacaagcacgtatcagaaaacaattaacttgcgcttcccccggaaaactaaagcagcaatcaaataactgcctacattcacgctcccacaatcaacatcagtaaacatgaatgcccttgcccttcaggcccgggaacattcacttaaacagcgcacaaaaaagggcgccaagggcgcccactcatcgatgcttttgcaaacttattaaatatgaacgctatttttcagcgccgtcactcactgcgagtctaccggcaccataccgagcaaacgactcacttgggccaactcggtttcccggcgcatggccgtaaacagctccaccgcttccggatagttgcgcgtcagcatcgccagccattgtttcaaacgacctggtgcctgacgctcggtcagttgcgccaccgactgagtccagaagtcctggagcatgggctgcatctgcgcccaggtcatttcaaccacctcctcacccgcccgcgccgcagcgatctgccgcgccaggtccgggcgcgccaccaggccacggcccagcatgatgtcttcggcaccgctgatttcgcggcaacgcttccagtcttcgacgctccagatatcgccattggcgaacaccggcaccttgaccacatcctgcacccgcgggatccattcccagtgcgcgggcggcttgtagccatccgtcttggtacgcgcatgcaccacgatatgcgcggcaccaccctcggccaacgcggtggcacagaccagggcgccgtccgggctgtcgaaacccaggcgcatcttggccgtcaccgggatgtgcgccggcacagcacggcgtacgtgctcgacgatctggttgagcaactccggctccttgagcagcaccgcaccgccacgggacttgttgacggtcttggccgggcagccgaagttgaggtcgatgacctgcgaaccgagctcacaggccagggcagcgttttccgccaggcacaccgggtcggagccgagcaactgcacgcgcagcggcacaccggcagcggtgtgggcaccgtgcagcagttccggggccagtttgtggaaatacgcgggggtgagcaggcggtcgttgacgcggatgaactcggtcacacaccagtcgataccgccgacacgggtcagcacgtcccgcaggatgttgtcgaccaacccctccatgggcgccaaagcaatttgcatggaaaacactcaacaaaaatcgtggcgcagtttactgggtttcccacagcaaccgttaaccccctgtcagggcggggccataaccgtcaaggaattcagccggcatgcgcttgggcttgccagtggacagctcaatgcagacgaaggtggtttgtgcgcgcaacagggtcgcgccgtcacgggggcggaccagttggaagcgccgggtcattttcaggcgctggtcccagtcgacgatccaggtggccagttgcagctcatcgccttcatagccagcggccaggtaatcgatctcatggcgcaccaccgccatggcgcgatccagccggcgatattcgctcaggtccaggcccaggcgctgggagtggcgccaggcgcagcgctccagccaggacacgtataccgcgttattggcgtgccccaggccgtcgatatcttcaggagcaacctgcagatcgatgataaacggcgttgccaaatcccagcccatgccttgctcccagtcgattaatgtcggcggggagagtgtatcaggcgctttgccgctcctgtagacgacggccggccaacaacgccagcacagcgtcgatcacgcgcggatcggccaggactttctggtgaccaccctgctccaggcgcaacaggcgactgtcgaaccaggcttcgtgtatggcctgagaggctttgaccgggacgaaggtgtcgtcttcggcatggacgatcaggcccgggatattcatctgatagtgggccacgtccaaatgcttgagcggcatgccgaaggtcagctcgacctcctggataaacgccgaacgtgcccgcgccggcaagccgaccatcttggtaaagccgcgcaatacatccagaaaccgtgagggtgcagcaatgctcaccaacgcctccgtgcgcagccccaactgcaccgccaacatcgcactggcaccgcccatggagtggccgatgacggcgtgcagcggcggcaactcggcggcagcttcaagcatggcacgggcaaacagcagcacatgggcttcacgccccggcgaacggccgtgggccggaccgtcgagggcaatcaccgagtagccgttgtcgaccaatgcgctgatcaggctggcaaactgggtaggtcggccttcccagccgtgcatcaacaacacggcaggcccctgaccccagcgcaacgcggacaagccgaaacgcagggtgatgcgctccgattgcgccagcagcggcagttcccagtcacgtggcggcaggtcgcggggcgtcatgaaggcgcgacgcatgcgattggcgaccgtttgtggtgccaggtgccccagcgtgccgttgaaacgacgaatccaggtaagcgtgcccatcatgcagccctcttctagcgcacagccgacttggcggcgcgcagcacacggtcagacaactcgcccggtcccaaggcgcgggccagggccaggccaccgatcatcagcgccatgtcagccagggctttgtcggtgtcctcggggctggcagccaactgggcggccatcagttcacagtgctcattcagtgcctggcggaactcatccggcaggcggctcatttcgccgaccgtggcgggaatcgggcaggcctgggcggtggagtcgcggtgcttgcgcgacaggtagaacgccgccaccaggcttctgcgctcctctccggtcagttgtgagtccatgtcatcaatcgacgcacgacgcttggccagcaactgagtgaaggcctccagcatcaatgcatccttgctttcgaagtgcgcatagaaaccaccgaccgtcagccccgccgcacccatcacttcacccacactcggttcggccgggccacgctggatcagcgcggcgctggcggcctgcaaaatgcgttcgcgggtttgcgcttttttatcgctcatcattgcctccgatgttcatgggttgaatattattaccataataatatttggcaagcgacaggcatgaccgttggtcagaagaaaaagcaaggagggcaaaagaattggccaaacgccagacaaacaaaagggccattcaataattgaatgacccttaaaaatcccgcagagcgggtaatcgtggcgtcccctaggggactcgaacccctgttaccgccgtgaaagggcggtgtcctaggccactagacgaaggggacacaaaccttctgtacactgatcaggctgaggctgatcgatccaaggacggtgtggccggaaccttggaactgtaaattggtggagctaaacgggatcgaaccgttgacctcttgcatgccatgcaagcgctctcccagctgagctatagccccggatttttcgtctcgcgacgtagcaggcctttcgaactgcttggtgaaactggcgtcccctaggggactcgaacccctgttaccgccgtgaaagggcggtgtcctaggccactagacgaaggggacaaaaccttctgtacagctgatcagcgctgagagctgatcgattcaaggacggtgtggccagaccttgaacctgtaaattggtggagctaaacgggatcgaaccgttgacctcttgcatgccatgcaagcgctctcccagctgagctatagcccctcatcggtgaggacggggcgaatcttaatggcggtttggaagtgtgtcaaatttattttcaacaatttccaaaattttttgccgggataacaatcacttaccggcgaaaccccggaaaaccggggtttcgtcgtttcaaccgtgtgctcaggcgatggcgcccagcagcttttcccactctttgttttctttcttcgacacaccaccaagcaaatcaagggcttggcgcagacggaaacgcgtcaggtccgggcccaggatttccatcgcatcaagcaccgacaccgaactcgcctgcccggtgatcgcggcaaacatcagcggcatggcatcacgcaatttcaattccagggattccaccaccgcctggatcgtcgcagtgatcgcatccttctcccactggcgcaggctttcgagcttccacaggatcaactgcatcagttggcgaacctggtcgcccgagagtttcttggattcaaacagcttggcatccgggctcacgcccccagcaaagaagaagctggccaacggcgcgacctggctgaacgtctccaccctgccctgcaccagcggcgcgatcttcatcatgtactcagggttcaacgcccactgctgcacacggctggcgaactcttccaccggcagatcacgcagccactggccgttgagccacgacagcttctcgatgtcgaagatcggcccgcccagcgacacacgcgacaggtcaaagttgtcgaccatttcttgcagcgaaaacttctcgcgctcatccggcatcgaccagcccatgcggcccaggtagttgagcatcgcctcaggcatgaaacccatgcgttcgtagaaggtcaccgaagtcggattcttgcgcttggacagcttgctcttgtccgggttacgcagcagcggcatgtagcacagctgcggttgttcccagccgaagtactcgtagagcaggatcagcttcggcgccgacggcagccattcttcgccgcgcaatacgtgggtgatgcccatcagatggtcatcgaccacgttggccaggaagtacgtcggcaagccgtcggtcttcatcagcacctgcatgtccatgcggtcccacgggatctcgacgtcaccgcgcagcatgtccggcaccacgcacacgccttcgctcggcactttcatgcggataacgtgaggctcaccggcagccaggcgccgggccacctcttctttcgacagcagcagcgcgcggccatcgtagcgtggggtttcgccgcgagcctgttgctcggcacgcatctggtccagttcttcggcggtgcagaagcacgggaacgcatggcccatgtcgaccagctgctgggtgtactgcttgtagatgtcgctgcgctcgctctggcgatacgggccgtgcgggccgccgacgtccggaccttccgcccacgtaatgcccagccagcgcaaggcatcgaaaatctgctgttccgactcgcgggtggaacgcaattggtcggtgtcttcgatccgcaggatgaattcaccgccgtgctgcttggcaaagcagtagttgaacaaggcgatgtaagcagtgccgacgtggggatccccagtaggcgatggcgcgatgcgcgtgcggacggtggtcatggcaggtctcgaatgggcgataaaactgaaaattgaaacaaggggcgaatggtaacagcctgggggatttctggaaaaccgcggcgcggctatcgggggcaagccccctcccacatttgaccgaggtccagtgtgggagggggcttgcccccgatgaaaccaccgcaaatcagacggccagcaagcgctcccgcaacttgccgatctcatcccgcgtctgcgccgccgcctcgaactccaggtcccgcgccagctggtacatcttctcttccagttgccggatgcgcttggtgatctcgctcggcgagcgcaattcgttctcgtacttggcgctttcctcggcagccttggccatgcccttgcgcttcttgctgcgcgagcccggcacggtggcgccttccatgatgtcggcgacgtccttgaacacgcccttgggcgtgatgccattttccaggttgaacgcgatctgcttgtcgcgacggcgctgggtctcgccaatcgcccgctccatggaaccggtgatgcggtcggcgtacaggatcgcccggccattgaggttacgcgcggcacggccgatggtctggatcagcgagcgctcggagcgcaaaaagccttctttatcggcatcgaggatcgccaccagcgacacctccggcatgtccaaaccttcacgcagcaggttgatccccaccagcacatcgaaggtgcccaggcgcaggtcgcggatgatctccacgcgctccacggtgtcgatgtccgagtgcaggtagcgcacccgcacgccgtggtcggccaggtagtcggtcaagtcttcggacatgcgcttggtcagcgtggtgaccagcacccgctcttccagggccacgcgcttgttgatttccgagagcaagtcgtcgacctgggtcaacgccgggcggatttcgatttccgggtcgaccaggccggtcgggcgcaccagttgctcgatcacacggcccgcatgctcggcctcgtagttacccggcgtggcggacacaaaaatagtctgcgggctgatggcttcccactcatcaaagcgcatcggccggttatccagcgccgacggcaggcggaaaccgtactccaccaacgtctccttacgcgaccggtcccccttatacatcgcgccgacctgcggcacgctgacgtgggattcgtcgatcaccagcagcgcatccggcggcaggtaatcgtagagggtcggcggcggcgccccggattcgcggcccgacaggtagcgcgagtagttttcgataccgttgcagtagcccagctccaggatcatctccaggtcaaagcgggtgcgctgttccaaacgctgggcttcgaccagtttgttgttggaacgcaggtactccaggcgctcggccagctcgaccttgatgccctcgatggcgcccatcagggtttcacgcggggtcacgtagtggcttttcggatagaaggtgaagcgcggcagcttgcggatcacctcgccggtcaacgggtcgaaggccgacaggctctcgacttcatcatcgaacagctcgatgcggatcgcttccaggtcggattcggccgggtagatgtcgatcacgtcgccccgcacccggaaggtcgcgcgggcaaagtccatgtcgttgcgggtgtattgcaggctggccaggcggcgcagcagttcgcgctggtcgagtttgtcgccgcgatcgacgtgcagcaccatcttcaaataggtttccgggctgcccaggccgtagatgcacgacaccgtggtgacgatgatcgcgtccttgcgctccagcagcgccttggtcgccgacagccgcatctgctcgatgtggtcgttgatcgacgcatccttctcgataaaggtgtcggaggacggcacataagcttcaggctggtagtagtcgtagtaggaaacgaagtactccaccgcgttgttcggaaagaacgccttgaactcgccatagagctgcgcggccagggtcttgttcggcgccagcaccagggtaggacgattgatttgcgcgatcacgttggcgatgctgaaggtcttgcccgaaccggtcaccccgagcagcgtctggtgcgccaggccggcttcgatgccttcgaccatctggcgaatggcttcgggctgatcgccagcgggttcaaaacgggtgacgagttggaaatccgacataacgtacctcgtgtagtcaccccagactcgaaaccgccagggacgaaatagctcagcaacccgcgaatgatcatcgcaggttgcaggaaaaaaccatgatagctgtagaagtggtgccgaatgtgacgggtttcaagaccatcgtcctacgtgccgtgccggatcaatgttgcaataagactaacggtcagcaaataaaccgaaaaacttggccgaaaagccatttcggctgtcgccctcggcagtgatgggctctatactagctccccgtttgtgcaccgctctagtgcattcggctggagcgcgacacgtccctcctaccccccatagagctgccgcaaaaatgagcctgttctccgctgtcgaaatggcaccacgcgatcctatcctgggcctcaacgaagcattcaacgccgatacacgaaccaccaaggtcaaccttggcgtgggcgtttactgcaacgaggaggggaagattccactcttgcgtgccgttgccgaagcggaagccattcgcgtggcacaacacgccgcccgtggctacctgccgatcgatggcatcgcagcctacgacaaggctgtgcaaaccctgctgttcggcgctgaatcgccactgctgaacgctggccgcgtcaccaccgtacaagcggtcggcggcaccggcgcactgaaaatcggcgctgacttcctcaagcaactgctgcccaacgctgtcgtcgccatcagcgacccgagctgggaaaaccaccgcgccctgttcgaaaccgccggtttcccggtgcagaactaccgctactatgacgccgccacccacgacgtgaaccgtgccggcctgctcgaagacctcaacgccctgccgccacagtccatcgtggtgctgcacgcctgctgccacaacccgaccggcgtcgacctgagcccggccgactggcagaacgtgctggacgtggtcaaggccaagaacctggtgccgttcctcgacatggcctaccagggctttggcgacggcatccacgaagacgcagcagcggtgcgcctgttcgctgaatcgggcctgaccttctttgtgtccagctcgttctccaagtcgttctccctgtatggcgaacgggtgggcgcactgtccatcgtcggcgagtccaaggaagaaagcgcgcgcatcctgtcccaggtcaagcgtgtgatccgcaccaactactccaacccgcccacccacggcgcggcgattgttgccgcagtgctgaacagccctgagctgcgcgcccagtgggaagccgaactggccgaaatgcgcctgcgcatccgtggcatgcgcgagcagatggtcgcaaccctggccaaggctgctccgggccacgacttcagcttcgtcggccgccagcgcgggatgttctcctactctggcctgaccgttgagcaagtcacccgcttgcgcagcgaattcggcatctacgcactggataccgggcgtatctgtgtggcggcgttgaaccagtcgaacattgatgcagtcacaaaggcaatcgttcaggtgctgtaaacctgcagccgttgcaccagaaggggaagccgatggcttcccctttttcgtctccagcccctagactgaacctcgaccgcccctttgctgtgagtaccttatgagaaacgatgacctggacctgcgtgccgaccgcgacgaactggaccacttcaccccgcgcgcaccgcaagtaaagcgccagaagagcctggtgctgcaagtggcgctcggtgtgttcctcggtggcctggcgctgtggctggtgcaattgggcgcgactgcaatcatggcaaaactggccatgggcaccctgcaattcggcggctgataccaatcacaatctaggaagcaaccagatcgcgttcctccaacagctttacaaagctgttgaggctctgcgacaccgtcccgcggcgccagatcagccaggtattcaaaatccggaagttatccgtcagcggccacacactcaccgctgccgaccccggcatgctctccagcatgctacgcggcatcagcgccagcccggcgccggcgctgacgcaggcgagcatgccgtggtaggactcgatctcgaaaatcttgcccggcaccgcgccgtcctgtgagaaccagcgctcaaaatggtgccgatacgagcagttggagcggaaggtgtagatgttctcgccattcacatcctgaccacgcttgatcggcgcatgatgcagcggcgcaatcaccaccatctcttcttcaaacaccaccaccccctccagcgtggcatgcagcaccggcccatcgacaaacgccgccgccagccgtcccgataacaccccttcgatcatcgtgcccgacggtccggtgctcaggtccagctcgaccttggtgtgcttctggttgtacgccgcgagcaacgccgggatacgcaccgccgccgtgctttccagcgaaccgagggcaaacgcgccctggggttcctcccccgccacggtcgcgcgggcttcctgcaccaggtcgaggatgcgccgcgcatagccgaggaaattccagcccgccggcgacaggcgcaagcggcttttctcgcggataaacaattccacgcccaggtcctgctccagctgcttgatacgcgtggtcaggttcgacggcacgcggtgaatcaactgcgcggcggcgctgatgctgccttgctcggcaacggccttgaagatttccagctgcaccaggtccaagtcattctccaatcgtgaatgtattgcttaatattattcagtttccagaaaagagctagccccgtaggctgaacccaatctcatcattcagcaggacggtgccatgaacgcgactacccacgccctctcgatcaacccggccaccggcgaaacggtcggcagctacccgtatgaaaccgcgcagcaactggacgccgccctcgagcgcgccaccctcgccttccgcacctggcgccgccagccggtcagccagcgcgccgagttgctgctgagcctggccagcgctctgcgcgaacaagccgaagacatggcgcagatgatcaccctggaaatgggcaaacccatcgcccaggcccgtgccgaaatcgaaaagtgcgcgcagctcagcgagtggtacgccgcccacggcccggccatgctcgccccggaaccgaccctggtggacaacggcagcgcccagatcgaataccgcccgctgggcccgatcttcgccgtgatgccgtggaacttcccggtgtggcaagtcctgcgtggcgccgtaccgaccatgctggccggcaacacctacgtgctcaaacacgcgccgaatgtgatgggcagcgcttacctgatccaacaggcgttccgcaaagccggtttcgacgaaggcctgtttgaagtggccaacgtgaccaacgacggtgtgtccaaggccatcgccgacccacgcatcgccgccgtcaccctcaccggcagcgtgcgcgccggtatcgccatcggctcccaggccggcgccgcgttgaaaaaatgcgtgctggaactgggcggttccgacccgttcatcgtgctcaacgacgccgacctcgacgccgctgtgcaagccgccctgatcggccgcttccagaacagcggccaggtctgcgccgctgccaagcgcctgatcatcgaggacggcgtggtggaagccttcaccgccaaattcctcgaagccagccgcgccatggtcatgggcgacccgacttcagccgccacctacatcggcccgatggcccgcttcgacctgcgcgacgagttgcacggccaggtccaggccaccctggaagaaggtgcgaccctgctgctgggcggccataaagtacccggcgccggcaattactatgcgccgaccgtactggccaacgtcaccgaccagatgacctcgttcaaacaggaactgttcggccccgtagcctcgatcatcaccgcccgcgacgccgaccatgcggtggccctggcgaatgacagcgagttcggccttaccgcgagcatcttcaccagcgacccggcgaaggcgcgggacatcgccaatcagctggaaaccggcggcatcttcgtcaacgccttcagtgtttcagaccctcgggtggcgtttggtgggatcaagaagagtggcttcgggcgtgagctgtcgcacttcggcgtacgggagttctgcaatgcccagaccgtgtggctggatcgcaaataaatcagagcagcaccagccccgggccaagcccgctcaccacaggaatctggtcgcctgaaagtgtttatgcacgaatatgccgccgcacacactgcaccaacccctccagcgcctgcgacttcactggcgcgagcacacagaccgtgtgttcgcgctggtcctccttcaccgtcagggtgtaatgcacctggcccgggttaccgggcgcgggttcactgctttgcggcagctgaaagaagtcgcacgcctcgaccaactgccgcaactcctgctggtcctgctcgggcaggctgtccaactcaactgtacgcggcttggccaggcccggaaaaaaagcaggcccgccgttttccttcagcgaaatttgcatggctgttcctcacgtcagaccgaaataccgaccgccttccagccctccttgaccgccttctgctcatccttgttcgcaccgtagagtcgaccggcaacatcgtaggtaatgcgcgcaaagcgcaaaaaccctgagttcggtcgcaaccgcgcatcgcgcaatgcgtcgtaccagatgcgcccggcacgctcccaggcaaacccgccgatgtttgtcgccacctggtagaacgcatggttgggaatgccggaattgatatgcaccccgccattgtcctcgtaggtctgcacaaaatcatccatgtgcccgggctgagggtccttgcccagcagcttgtcgttaaacgcggtgccaggggctttcatcgagcgcagcgcggtgcctttgatctttttggtaaacagccctttgccgatcagccaatcggcgtcctcggccttttgcttcaacgcatactgcttgatcaacgaaccgaacacgtccgacagcgactcgttcaacgccccggactggttgaaatacatcagcttggcctcatcctcggtgacaccgtgggccagttcatggccaatcacgtcgagggctaccgtaaagcggttgaacagctcgccgtccccatcaccgaacaccatctgggtcgagttccagaacgcattgttgtagttctggccaaagtgcacggtagcgtccagggccatgccggcatcgtcgatggagttgcgatcgaacacctggtcgaaaaaatcgaaagtggcgcccaagccatcataggcctcgtccaccgccgcgtcgccactgatgggctggccttcgccacggatcagtttgcccggcaggctgtcggtgccctcggcgctgtagatcgaacgccgtttgtcggcgcccatcgccagcgccaggtgcgccggccccttggcaggcaccgcgaccatgcgcagtgagcggaacgtgctgtccttggcgcgagtacgcagcgcgacatcccgttgcgctttgtcaccgttacgcgcgatctggtcgagcatatacggcggaatcaggcagaaaatcgggtttcggtaatggcgatcacacattggctggctccttgttggcgtgtgctgaacgtccgggtgaccgtttgaggatagcccccaggggttggtgcgcatgatcaattgtcattaacctatgttgcagtcgtgtttatccaaggaggactgaccgatgcccgcacgtaaaaccaaaatcgacctcgcctaccgcccccggctcgccgacatgcgcccgttgatcgcgccgagccccacgctgctggaggccagggcagcgacaccccgcgtcaccccggccaaagacttgaaggaccgaagtggctacgcagaagactttctcggcagcttcggggtgccctggcccacgctggaggaggcgttgacgagtgatgcccagaagcgcctggactacacacacttctccatcacgatgtcacgtgccaagcgcctcgcgctgtatgtgggcgtgaacatcgatggcgggcaacatgtggacatcatccgcagcaacgacacctgggcttacgatggccgcctgccggtcgacgcccaagtcggcgaagcgctgtatgccagcaacggcctcgatcgcggccacctggtgcgccgccaggaccccaattggggtgatgtggcgcaaaccgccaacctcgacaccttccacttcaccaactgctcaccgcagatgagcgggttcaaccagaagacctggctggaactcgaagactacatcctcgacaacacccagcgctggaaagcccgggccacggtgttcagcggcccggtgttcgccgacgacgaccgcgtgtaccggggcgtgcagatccccaaggcgttctggaaggtggtcgcctacctcagcgatgacggcaaaccttcggccagcgcctacatgatcgatcagagccgcgaactgggccagttggagctggtgttcggccagctgcgcacctaccagcgcagtgtgatccagatcgagcgcctgaccggcatccgcttcggcaacctggccgactacgacggcttcagcaacgaagaacgcgccaccggcacgcggattgaagcgctgatccaggggcctgaagacattcgtctttgatcaacgcttcacaggttgatccgcgttgacaactgacactcaccacgacgcgaggcgagccgctcttgatctggctgatacgattccatcaagggtgaacactgcatccgtggcgagcgccgtacccaggcgagtgaacgggctagccatcattgcgcgttgatgtaatgaaactgtgcctgcgttttctcgactgccgcacgcacggcgtctttctgcgcctcggtgcccgagtagtaaatctgcatacccttcaagttttgcccttcgactgctttgccgatcaccgcaacatcaaccggcgtgctggcaccgataatcaaaaagaacacatcgcccaagcgtttggcatcgagcagctctgccctgaggtgcgcggcattttgctcacccgccatggaaatcgccagggtatcgccgaacataccgcttttggggatgctcatcgtatgcagccggagcttgtccgaccccgccggcatcgacttgacataggcggaggcggcctcatcaagaatctgctgttcagatttaccctgggtggcacaaccgacgagagcggcggcgagggcgagcgcgacgaataatttcactgtctattccttgtgataaagcgatccattggctgcgcatcataggagccccaccttcaaagagccaccgttggtttcacggcctcccgctcgaccgcgtgatcgactaccataccgcgccggttcccaaacgggactaatagggaatccgaggcacggtacacccgcgccaatcggaactgcccccgcaactgtaggtgctgagcctgctcctcgatgccactggacctcgtccgggaaggctggagcgtggcgacgacgcatcagtcaggagacctgccggcccaagctcaatcactaaccggcggggtgtccgggaaggacattcttgcctgtcgcgcccccggcgcccgagagtggatttccgaatggcacgtacgcatcactcggagatcgccccatgctgccacgcgttatcgccctgcttacaggtgttggcttctgtgccctggcccacgccgcgcccactcactacccgctgaccgtggaaaactgcggcagcccgatcaccttcccgcaagcccccgcccgcagcgtgactatcggccaggccgccaccgagatgctctacgccctgggcgtcggcgataaagtggtcggcacctcgctgtggttcaacagcgtgttgccgcagtacaaggcgcagaacgacaccatcgagcgcctggccaacaacgagccgagcttcgaagccgtgatcgccaagcgcccgcaactggtggccgccgagctggaatgggtggtggggccgcaaggcgtggtcggcacccgcgagcagttccatgaactgaagattcccacctacctgctaccctccgactgcgaaggcaaggacaacctggtgggcgccgacggcacgcggctggagccgtttcgcatcgagaccatttataaaagcatcagccaactggcgcagatcttcgacgtacaggatcgcggccagcagttgaacgatgaactcaaggcgcgcctggccaagtccgtcgccaccgtgcagggcaaaggcctcaagcaggccagtgcgctggtgtggttttccagtgccgagatggccagcgacccgtacgtggccggccacaaaggcatccccgaattcatgctgcaaaccctcggcctgtctaacgtggtgcagtccgatgaagagtggcctgccgtcggttgggaaaccatcgccaaggccaacccgaccttcctcgtcatcgcccgcatggaccgccgccgctacccggccgacgaccatgaaaagaaactggccttcctgcgcagcgacccggtcacgcgcaacatggacgcggtgaaaaacaaccgcatcatcatcctcgacgccttggcgttgcaggctagcatccgcatgttcgacggccttgaacaactggccacggccatcgacggctacgacctgccaaaatgatgcgcaccctgctcgccctggccctgctcctgattgccgtgctcgccggcgtggccatcggcgaaaccgccatctcgccgcaggtggtgctccaggtactcgccaacaaactgtggggcgccggctacgtgctcgaccccatcgatgaaggcgtggtgtggaactaccgcctcacccgcgccctggtcgctgcggcctgcggtgccgggctggcgacctgcggggtgatcctgcaatcgctgttgcgcaacccgctggccgatccctacctgctgggcatcagcgccggcgcttcgaccggtgcggtgctggtggcgttgatgggggtgggcggcggcttggtgtcgttgtcggcgggcgcatttgtcggcgcgatggcggcgtttgccctggtaatcctgttggcacgggccagcggttcggccagtggcaccgggcagatcatcctcgccggcattgccggctcgcagctgttcaatgcgctcaccgcgttcctgatcaccaagtcggccagttccgaacaggcccgcggcattatgttctggctgctcggcaacctcagcggcgtgcgctggccctcggtgtggctggcggtgccggtggccgtcgtcggcttggctgtgtgcctgtggcaccggcgcgcgctggatgcgtttacctttggcagcgactcggcggcgtccctcggcatcccggtgcgtcgcgtgcagtttgtgctggtgggctgcgcggcgctggtgacggcggtgatggtgtcgattgtcggctctatcggctttgtcgggctggtgattccccacgccgtgcgcctgttgcttggcaccgggcactcacgcctgctgccggcgagtgccttgggtggtgcgttgttcctgattgcggcggatgtgctatcgcgcacgctgatcaagggccaggtgattccggtcggtgtggtcaccgcgctggtcggtgcgccggtgtttgcgctgatcctgatcggccggaggaatgcgcgatgagcgtattgagctgccgcgggctgggcttcaaggtgcgcgaggccgagttgctgcgggatgttcatctggacgtgcagttgggtgaaaccctcgggattgtcggaccgaacggctcaggtaaatccaccttgctcaagctgctcgccggcttgcgtgcacccgcatccggcgaagtgctgctgggcggccagcgcctgggcacgctgtcccgccgcgccatcgcccagcaactggcggtggtggagcaacaggctgacaccgacgacgccatccgcgtgttcgacgccgtggccctgggccgtacgccatggttgtcggcgctgagcccgtggtccgttgaggacgacgccatcgtgaagcaagccctgcaggacgtcgacgccacccacctgagccaccgcgcctggcgcagcctctcgggcggtgaacgccagcgcgtgcacatcgcccgcgcattggcgcaacggccgcagattctgttgctggatgagccgaccaatcacctggatatccagcatcagctggcgatcttgaagggtgtgcaggcgctgcccgtgaccaccttgattgcgttgcatgaccttaaccaggcgctgacctgtgaccgcctggcagtgttggatcgcgggcggttggtggccctgggcaaaccgctggaagtactgacgccacaacggttgcaggagacgttcggggtgcaggcgcattacctgacggacccgcttgatggggcgaagatcctgcggctgcgccccgcttaatactggaatagcggtttatcgtggcgagcgggcttgccccgcgttgggctgcgaagcagcccnnnnnnnnnnnnnnnnnnnnnnnnnnnnnnnnnnnnnnnnnnnnnnnnngggctgcttcgcagcccaacgcggggcaagcccgctcgccacaacaagcccacttgccacaaaagcccgctcgccacaggcctacaggaactgctgcatatgcgccgtccgccagaccgggtctgcttccacatctacgacctcgaagccctgccgaacccagaactcaatcgcccccggcaaaaacgggtgggtatgcaagtacatcacctcaaccccatccgcctgcgccatcgcttccaacgcacggtacaactgccccgccaagccaaaacgacgaaactccggcgctacgaacaagcgcaccacctccaccgtcttgcggccttggtaatccagttgagggaaacgcccgtcatagggcagatacccgatggccgcaacaatttcgccaccgttgcgagcgatcaaaaagcggccttcgccctgaagataaatcgacgcaaagcgcgcgaggtcatccggcatgccggcgtcgtgaagcttggggaacagctccgcacgcgcctgcagcacaaagtccagcacctgtggcacatcccccattgcaactggccggatgatcactggcgcaactcacacaccgcattgcccttcatgcccgacgcatgcacgctcacatggcgcaccgtaaaaccgggcttcaccaccagcttcttctcttcccaggtgccgccgttttcaacctggtaaccgatggcgccatcggcttgccaggtcaggcgcagggtgtacacgccgttatgatcgagtgtttgatgaatcggcgtatcgatgatcggcttggccttattgaacgtacgcaggttgaaaatccgctgatccgtaccggctggcgaatagctggagagaaacaacgtatcgtcttcggccgcatcctcggcggccgccaggatcaccgacggcacccacttctcgccacggtcctgggtgtcggtgacgaccttgcaggtcaactggcccttgccggtgacgttctggcgccagcccgtttcgtaaaaaccgtagggcacatcgaagcgcagggtcttctcggtgacttgctcgcagccggccaacaggtagagcgctgataaagcgatgactccttttagaaacttcacgtgctgtccttggcttgaataggtggggccgagagattacccgcgcagtcagataaagtggatagatttagcgggctgccgtgtcgtgatatacctgcgcccgtcattgatttcaaacccgacgggttaaaggagatgagcagaaaatgactgaactacccatggctgacgcgcgccagaatgataaaagccgcaaggtcatccagaccgctatcaaagaacgaaacctggcaggcgcggcaaacaacaccaagtggaacgaactgattacacacatgcgccagcgctcggggtgggtaccgtcttatcgctcaaaatacatcacaggccatatctcgggatgggatgtggaatggttttaccacctacctttcccttttgcgtatgtcgaatggctcgacatcggcttgtggcaagaagcgccttcgttaggcgtattactgccacgaacgtatattgaccataccgaggaaatctctcaggttatctcgcagataggcttcgaatttgaagtgaaagccgacgtactgagaatttggggataccttccaaaatccttcgatgactttccgccggcataacgtacagcggcggatcctgcggctacgcccgaactaacgccttgccactgctggccctgctcagccaccgtcactgtagtgagcgggcttgccccgcgctgggtggcgaagccgccccaaacccaggcgcctcggtgtgcctggggtcccgttgcgaacctggcgcggggcaagcccgctcactacaagttacagtcggcatggcggtttgaatgatcatctccctagtagggcactgatccactggtggctataagcaagcacgcgcccccccatcaccaccggaaaatgaataaacccatgcgccgcctccggcaacagatgcgcctcagcccccggccaccgctcagcgatcaacagcgtgtcatccttcaacgggtccaacgcccccacaaacatcaacgccggtggcaagccttcgaagtcgccatacaacggcgataacggcggctgccgacgctcatcatcgctcaggcccggcgtcagcatgcgcaacgcctcgaccatgcctggcccgtccagcaacaaggtgtccggccccgccgcacgtacgctcggggtgccggtcaagtcgtacacgccgtaatacaacaccgccccgcacacgcgctggagcagttgcggccattgcttcaacgccagcaacgtcgccgccgccaaatgcccaccggccgattcgccgaccacgaacaccggcaggccggcaaattcatcggccgtgagcaaccaacgcgccgccgccaggcaatcgtccatcagcccttcgaccggcgtgtcgaccgccaaccgataatccaccgacaccaccgccacctcgcaggcgttgaccatgcccaggttgaggtcgtcatccatctgcgcattgccgattacccaaccgccaccgtggatatccagcaccacacccttgggcttgccgctcggccgcaggatgcgcacgggtacggagtcaaccaccttgcattcagcagccggcgctttcttgagcatttggctggtgcgcaacagcgcctggatcaggcgcggtgtgacgcgattacggatcttgaagcgcggcatccaggcaagcttctggttgaagcgacgcatctcggccagttccggctcactggcgggccagggtgtataggccatcaacggttattccgcaggatcgagaagttcagcgccgccgccacgcacagccaggcaaggtaggggaacaggatcaagccggtgatcaaatccagttgcactgccagtaccaccatggtcgccacggtcaaccacagcaccgcaataatcaccatcccggccaggatgcgatgggcgccgaagaacaccggcgtccacaaggtgttcaaggcgatctgcgcggcccacaaggccagcaccatttggctgcccgggatgaggctgaggcgataaccggcccaggccagcaacaggtaaataatcgtccacgccaccgggaacaaccagttgggtggggtgaagctgggtttgaccagggattcgtaccaggctcccggcttgaagatgatgccggtactggcagcggcggcgcaggcgagcaggaagatgaagaaggtcatgggcggtccttggctgtcgtcagcggttgtgaggggaaggcgttgtccgtgctttatcaatgactcaaacgctcgcgcaaaaattcaatcctgcgtggcaaatcgcatacaacagcgctcctacttcatgtcatcaaaattcgctaaggtgcttcgacaccctaacctgtttgctcaccagcgagatcgcctgccttgacccatgcctccaccccaccctggaaggtgttcctgatcttcctgcgcctgggcctcacctgcttcggcggcccgattgcacacttgggttattttcgcgaagagttcgtggcacgccgccgctggttgagcgagcgcagttacgcggagctggtcgcactgtgccaattcctccccggaccggccagcagccaggtgggcattgcgctcggtttgtcacgggcgggttacggcggcgcattggctgcctgggccgggttcaccttaccgtcggccctcatcctgatcctgttcgccctgggcattgcccaccacggctcggtgatccctgcgggggcgttgcatggcctcaaggtggttgcggtggccgtagtggcacaggcggtgtggggcatggcgcgcaacctgtgccgaggcgtcgcccacgtcatgctgatgctgatagcggccggtgtggccctgctggaaccctccgcctgggcccaggtcagtgtgatcgccgccgcaggcctggccggcgtgatgttgttcaaacccgagtcgagtgccggacatgacgcgctgccgatccccctcagccgccgagcgggggcgctgtggctgggcgctttttttggggtattggtgggcttgccgatcctggccgactggctgcccaacaccaccctggcgctgctggatgccttctaccgcaccggttcgctggtattcggtggcggccacgtggtgttgcccctgctgcaggccgaggtggtgccaacgcactgggtgagcaacgacgtgttccttgccggttacggtgccacccaagccgtgcccgggccgctctttacctttgccgccttcctcggtgcctcgatgaaccagccacccaccggctggctgggcggcgtggtcgccctgctggcgatcttcgccccgtcgtttctgctgatctttggcgccttgcccttctgggccagcctgcgccgcagcccacgcacccaggccgcactggtcggagtgaacgcagcggtggtaggcctgctgctggcggcgctgtatcagccggtatggaccagcgcgatagtgaccgggtacgaccttggcctggcgctgctcgcattcatcgccctgctagtctggaagctaccgccgtggctggtggtggctggcagtgcagcgctgggatgcctattgggataaccccggctccacaattcgcagccatggccagcgcgcctgataactgcgggccttctgcacaaacaacgccggctccggatgcagcgggttgatgcgcaacacgccctgctccacatcctccaacccataaggcgcatacacctcgcccgtggcaatctccaggccgatgcatgtgcccgccaccaggtaacggtcaatcccctgcctggccgtgtgcaactgcgggtaaggccggccaaagcgctcgccgtaccacagatgcacccgcgcctggttcttcacctcgacattgacgcccaggtcttggaacaagcgctcggccgcacggatgactgcgtcttcagcctcgtaggacaggtcggtatcgaagtagaaaacgtcgtagtcctttacgccctgggccgccggcaaattcgagtgatgattccacaccgcctggaacaggcagcccgccgtgaggaagcactggtccacgcccaggtcgggcaggcgcgcggtgatttcggcgttgatggggttggccatggccaggttgagcagggtttcgacagtcaatgtcatgggctctccgttatccgtgacgcgctcgaacggcagaggttacaccacggcgtggagggtttcgtgacccgcgcttttcgatctcacgcgggatcagcgtaaaccaggacttgcggcagcaccgcccttgcccccccttcaatgagaagcttcagcctcggtcagcggctggcgcttggcccactccatcagttccagattgggaatgtgaataacgccatccacacgaataatgtaattgggccaaggaatatccacccccgccctctgcaaattggcaatgcgccccgccgcatggcgatcgaccttgtagcaatcgaacgcatactttgaagtctcgtccttggaattgtattgccggtacttcaccacaacggtgcattttttctgcggcaggtccgtaacctcgctgagttcagcaacgctcgcagggatcagcagcccgttcgttgcattcaccaggacctgctcgctcgccttgatcagcctatgccctttcgggatgttgaacagactcatgtccgggcttttgtcagcggcggtttcaagcaccagccccgtcaggatggccgcacgattgccgacattcgtcaccaacacctccatccggtcaaaatcgctgtaagccagcgtgatgtccagttttgaatagtcccctttcaaccaactccaggcgggaggaacaaccacagaggctatagatacaagggccactggcagtccgaaaagcagactcaaccgttccagcttgcccttagtcaacttcttcactcgattccctcttacacataggctgatgtcacggccagatagtggcacttaaccatcatgccatgccttggctcgaccatcagccgcctgagaggggtgttttcacgcctgcaactcacccgcccgatgcgccgccgcgtcgtcgtacaccacatacaacgactcggcgacttggctcttgatggccttggtggactcaaggcccagcacaaaaccctcggccttgccgccggcgcgattgagttcttcaggggtggcggcgccggtgatggcgtcgaacagcttggtggcatgggggctaacgcccttgggcaggctgatctggtcgatggacatgggcgataccttaaaagagagaattcggtagcgcgtgcaaccactgccggggtggcatggtagaccggctggctgagaaagggggctttttcatgaccctccccacaccaccgtgatagcgctaagctacatccccctcccgccccgcaggcccagcaccatgaccctctcccccgacttcaccccctgggcctcgttgctcggcggtgcactgatcggcctcagcgccggcctgttcatcctgctcaatgggcgcatcgccggcatcagcggcctgctcggcagcctgctggccaaacacgctgaaggccgcgctgaaaagggcctgttcctgctcggcctgctcgcctcgccctggctgtggtcactgttcgccagcttgcccggcgcgtcgatccaggccggtggcgcagcgttggtgctggcggggctgctggtaggcctcggcacccgctacggcgccggctgcaccagtgggcacgggatctgcgggctgtcgcgcctgtcgctgcgctcgctggtggcggtggcgtgcttcatgggcagcgggtttgcggctgtctacctcatccgccatctgatcggagcctgagcatgcgcaaactgaccgccttgatcgccggcctgatcttcggcctggggctgtacctcagcggcatgaccaacccggccaaggtgctcgggtttctcgacctggccggcgaatgggacccgtccctggcgctggtcatgctcggcgcgctcgccgtcagcagcgtgttcttctttttcgccaggcagcgccgcaccgcgttgctgggcgcgccgatgcagatgccgaccaagcgcaccctcgaccgccggctggtgctcggcagtgtggtgtttggtgttggctgggggatcgccgggctgtgccccgggccggcggtggcgttgttgctgaccgggcaatggcaggtaggagtgttcgtgctggccatggcgttggggatgtggctgtttgagcggattgaggcgcgcagattggccaaggcttgaggcgcgggcgggaggttgtgctttatctccacccgcccccggcctacattgaacgccttatcgatcaaccccgaggtcagcccccatggcacgcatcgtccggattcacgcctacggcgacgccagcgtcttgaaactcgaagacgtcgacgtccccgcccccgccgccgatgaagtccaaatcgacgtcaaagccttcggcctcaaccgcgccgaagtgatgttccgcaaccacgcctacctgcaagaagccgaattccccagccgcctgggctacgaagcggccggtgtggtagtcgcggtcggcgccgatgtcagtgacctgcaggtgggcgacgccgtcagcgtcatcccaccgctggacatcgcccgctggggcacctacggcgaagtcgccaacgtgcccgcccacctcaccgtcaaacacccgcaaaccctcagcttcgtacaagccgccgcgtgctggatgcaatacgtcaccgcctggggtgccctggtggaacaggccaaactgacccagggcgacaccgtactggtcaccgccgcctccagcagcgtcgccctcgccgccttccagatcgcccgcagcgtcggcgccaccgccatcggcgtgacccgcacccgcgccaaacaacaagccctgctcgacgccggcgcccaccacgtcatcgtcagcgacgaagaagacctggtggaacgcgtgatgcaactcacccacgaccaaggcgcccgcgtggtgttcgacccgatcggcgggccgggttttgaagccctcacccaaagcatggcccagggcggaatcttgctggaatacggcgcactgagtgccgagcccacgccgtttccgttgtttaccgtattgggcaaatgtttgacgctcaaggggtatctgtacgccgagatcgtcgccaaaccggcggcgttggcgcgggccaaggcgttcattctggacgggctggcctcgggcgcgttggcgccggtgattgcgaagacatttgcgttggatgaggtgcaggaggcgcatcgttttttggaggcgaaccagcaggtgggcaaggtggtggtgacggtgtgagggcggtgtcctaggacatttcccaaagcagggcagtggcttgcccgattgcctacgcctgcgtcagaatccgccggcttgtgcgctggggtggtggaatctatggttgcgcggtcgctgaatttttcggtgatcgggtttagtagcccggatcggttatctgaatgtgcatgagcttcatcagtcagacatcacgtctgtgcttgatggcggctgtgcgcagggcgtcctcggacgcgccggctttagatatccaccggtctactaacctgcgtacagctgccacccactcgtttagtagcggggaggtggtggcccaagtcaggatatctttatgcctcacgtcatgcaggattcaaccgtgctcttctgcgttgctccagacgcaagcaatgaagccctcattgccaatagttacgaaaccttcgcctctgtcagtacccttctgctcgatctatccgaagatctgagcggcaaacatcgagatattgcactggctatccaccaattgagtgaactgggcgtgttactcacagccaagctccttgatcgtgaggcgccctccgcgggctgaccatagctatccagaagacgaggcaggtcagtggctgagtcgaagtatgaaaaatgggggcggattgatccatgaagaatcaatttgtccccttttcagtggactcaaaacggcctttgatgaatggctactctcggccaaaagctgacgatggctacaggcagaaatcgacccactgctgccgtctagatcagacgtgatctttgttggagcgggcttacccgcaaagaggctacttgagcaacacacatactcttcgagcgatgtcatctgcgccatcgggaatgtccactgaaatgcctaaatagtgttcaaggtgcagggtgagcgtgtgttcatctaccaacagatcccagtagcgctgatcttgaccatcgagcctctctttccagcaacctcccagcccttgctcaagaacccgggccacgtcctcgaaaagcgtccagtcggcttcttctgatacttcaatcctcaccatgcgtcacctcaccaccaaaagtcccccgattctggtggctcctgcgaatggtcgcaatgggtcgaaagtcgtcaatcgcgaagcgcagctattggccgtgagctgcggtacgcaactgaaagcttccggcccaaaaaagcggctccgaatcgccgaatgaaggctaagaaacctgatcacctatcactatgaggggttctccgaaggttacatcagatagccgagtagcctcagctaatgcccgtaaaggggcaggcaaatcgaaaagtgtcagtggattcagtgggcggcattgcagctcataccccctcaaggcctggcgtgaatcgcgatgaacgtctgaccagtcgtacgcgaagaacccacgtttggcaaattcaacgaaagcgtttacgccagccctggcagtgacccgatctacatcggacacctccggcaatgaaaggacaaattcttcggagttttcgacggagggcattgcggaatcaggaaccggccccggcccacccgtagtgaagagcgcaacctgcccgagggcgtcggtggcgacccatccaacatcaaagtcctggagaacgaagggagccaccatttgcacctactttataaaaagggacgagttgatttcctaactctacttcccagcccggagtgtgtaaaagcgcgtcggcaaactcttaaagcaggaagaaattcgacgagttcattatcccagctttaaacatccggttctggccgattgctgcccgctacgacaggcagaaatcggccagaagcagcacgtcagcacgagcagaaatcgccagactattcaaccggtagagacaacagactagacactgcgctggcagaaagactgtctcagataaggcgaggccataagttggtggcaatacgctttgtctgtgtacgccatcacaatccgcacccctttgcgataggctcaacgacaagtgttgaaggcgctttccctgtctgaatatcaactacctccaatgcgcaaccggatttaggagctgagtgggtcacttggtagatcccccccgcattagggacgaagctactgatgctcaaacaactcctatggattaacggctgatccgtgttctcacgctccttgattcctgagctgagtgcgctcaggtaaatgcgccgatcaggctggattagaaatcgattcttttcaggttctgacggtgaaacactacctagcacaccggtctctttcgtgtcttggcagtgagcatcgtagtaggcccaatacacttggctgcctccagacatgaattcgtttttcccccaatgagcatcaagggtggcgtgcggcgcattcggtgccggttgctggtagtgaccaacacaaccagtcagaaaaatcgcacagcagataagtatggatttagtcaacttcacaccaacctagaaaaatccagaaatggggacatctggtccgttatcggccagtctggtttaaacaagagagttcgtctcaaacgttgacgatgttatgcggacgattcagatggggccaggctgtgtgaaaacacatttttagaacgattcggccatgggggcattcgaccaggttttgaggcaacatatgatctctaagaatccagcagctcgacgcagctcgcaaaccaaatcaggaagaatgaatgccttcccgtcgccgcctcagtagtgtctgtcaaagtattgcgcatcacgctgcgagcagtctgtcgtacgtacacccacatctgttgcaagccctcaaagcgaccggggaatcgatcgcgacggtggatctaatgagtgcgaccccatacccgaaggagcttctcagtcatccccaccttcccaccgccctctcttcactacgtgatcgttttgaacagattttgaaatctgaaggatttttaataaccgacctcaacgaggccaagctatttttcaaacctgatcgccaataccgtgacgagtattgttgcgaatgccacgcaaggttgtctcattcaagcggccgtaaatactttgcggcagtcaattgcatgggtaaatccattgttccccagcttgccaatatctgaccaatcccctccggtaatgtcttcaatccagatgaaaagcgagctttaaggccaaaagtcggaatacgccgaggatgatctaagcttttgttcgtctagatcgtatcgggggcgatcatgaagcgatttattgaaggtgaggctcggacgcaagtcaccttgctgccggagtgtctggacgattacgtagccgaagaatggagaattggggccagcccacgttatcaataatggtgtgcctccccctattccccctgaccaacccgcttgctgtgggacttgttgttgctgaaattgacatcgccggtacaaccgcgatctgacccactttgcgtcggctacggaatgcacctgttttcttgcggtctgtagcacaacgctgcaaaggactcgcgccatgtcgattcgccccacgctctgcctgttgatcctgccactatttgccggctgccagtttttcccacagacccattacttcaccgcccccgacaacgagccgaaccccgcctgggtacgcatcgtcaatttcacgcagcacgccgatatctaccaatacgaaaacggtatgcgctcgggcggtgtcatccgcagcgggccgctgcccttcatccatacgcaggatcagggcatgcctaaagccgggcagcatttgacgtacgactattatgaaacccgcgtgcggcccggcatcggaacccatgtggggctgttctgggaggggccgcgcactcaatcctgttttgtcacggtgcagttcacgccgcaggctgggcgttactatcagttcagcctgacgtcgggctccagcggcacctgcacggccaggccctcgctgatcgagcgcgataaagcgggggcgggatggcatctcacgcctaatccgcaggtgacttactcgcctgtcggccccaccgccaaaacccactacaacaatagtcgcttcgaggacccggattaccagccacctcccggtctctatccggggatgtagggatcagcgaccaacgccagcaactcattcaccagttcaacggcttcctcctgatagccctcgcggagaattggagaattggggtcagaccacgttttcaagaatgctggtctgcccccaattccgttcaacacaaccgaccagaagtgaacactcgacactagagccaatggtttgagaaagtaccgatcagacaagctaccccgagcacagagggtttcatgcaatggattgttttcccacgctttgcactaaccgcctgatcctgacgccgcttcaattgactgatgcgacggcggtgcagcagttgttcccgcaatgggaggtcgtccggtatctggacaaccgcgtaccatggccatatccacctgatggcgggctgacttacgtgcgtgatgtagctctgcctgccatggcgtcagggcgagaatggcactggatgattcgcttgcgcgctgaacccgagtgcagcatcggcagcatcagcctgtttgaccaacctggcaaccatagaggcttctggctcgctccgcagtatcaggggaacggttacatgcgcgaagcgtgtaaggtcgtcaacgcttattggttcgaaacattattgcgcccggttatgcaggtgcccaaggccgccctcaaccacccttcacgcaagatctctcaacatgaaggaatgcgcatgatcgggacgcgggacggacattttgtctccgggcccatgcaggttgaaatatgggagatgtcgagaagcgagtggctcgctgcagagaatcaagcttgacctgcttcgtccatgtcagtgccggcggcaggggtgattgctgtcactcgcattaggcgcgggcccctcctcgcttcccacgtttgaaccgtctggcagcacggcttgcaacgcctcttacccatcggctggaactgaccgtcagacgtttcagtaaacgcatgcactggcctgcccggaatcgaaccgcgcgcaagacgcgacgcctgtcagcctcaggtcgcgcatccatcaggcatagcttggtagtggccagagccacttttgccccaatcgctacagcgacagccaggaagtacagccaacgatgattcttggcttgatcatgttgacccacaagcgcagacaattgcttcaaatagggcttagcagcagcaagccgcggaatgatgcattcgctcgccaatgccacggtttggctgccgatacgatcatccacaaggcccgcgggaccatccggtttcgccatgcaaaagtggtgggggacatactcgcaggtacttgagagcggcgatgactgcgaaatgtcgcccgataagtacttcaccggacatagcgtttgattgtagtcggcgatctctttgcgaatagcgattacatcctcatcgctcaggacccagcgactcgcggagtaaaaccctttggagtcattcggcgcgaactcgatgaattcgctggcttcaccttctttgatgttggtgaaggtccactgcgaatagcggctccactggcacgacttcaaatcatccagtccattggccttgcagtagtcgtcatagcgtctgatttggctcaacaagtagccgctggcgtcctggatgcctgacgtcgcctccttgagcatggcgttgtcctcgctggcaccgttgtctgctacgaagaacactgcagcgaccaatgccagcgggaaccagaaatggtcgtagatctggcggaaccgttcggtaaggttgaggttgtcatacgcgagaaccatgatgccccagccggtgatggcgcacagcatcaataggggaatcagcccaatctcactgccgagtttccccacgccatggatggtgtagcgcgttggcaggtaattgattgtcgggaataggccgaggcagctcaacacacctggtaggagcaagattcccaagtagataagtaggccctgcctcttgcccacggtataggctgtagctgccagcaatggaatcaccaacagtgacagcatcatcaggtagcccagcgtgatcaccattgcttgatcgggtgaccaatagctgccaatgattttcccagcggtgtcacgttcggtgaagcttgatgacacaacgtccaggccttccaaaatttggtgcaggttgtacgccgcgccatggaggaaggttacgtatgggtagaagaagttcgcgatggaaactggcattgacttaagtccttgaattactggcgcattccttggctatgggaagaataggggtcagaccacgttttcaataatggtagcctgccctctatttctgccagccacctcccagcctcaatccggggatgaagggatcagcgccagcaactcattcaccaatccaaaggcttcctgctgatagccctcgcgccagcgggctgagaaatcctccggcctgccctgctcttcccactcggccaacgccaggccattgataatttccagctcgaaccattggcgctgccaggcggcagcgtcggttaccagcgtggtgtcctgccacaggaactcggtgtgcgcgacaaattggctccacgcaaacagcccgtgtgaagccctttcgccctgcgcggtcaattgcgctttattcaccctcggtgccctcacgtttgcaattcaatccccactgaaatagcgccatgcccataacccgcgccgtggggtaaggcagtagaccctttgcgcaggcaagagaataagtgcgcaggagccttcggaccaccccacgattacacacgggggattaaggcgacggatttggtttaccacgtttacactggcgccttttgcgccactcactcaggcacgcttatcgacccccttacgaatggaatcgacaccatgctcacctccccgcgcccactcaaaccgctcatcggcctcacccttctcgccgccctcaccggctgcggcgcattgacggatgtgcgctccttctccacgccctacgccacgcccaccagcgctgaaaccgtgcgcctgcgtgtgatgagcgatggcatggtgcgcgccgtgcccaattccaactgcatcaacttccgcctgcccggcgcgggggtgatggtggccaaccgagagggctacgcagaccgcaacggcgaaagcctgggcatggcgcccgtgcagcggtcttcggaggccacggtgatgagtgaactgcgggtgccggccgggcagcccatcgcgtttcattacatcggcaatcgttgctacaacatgttcactttcgtgcccgaggcggggatggattacgaattggatgcagcgggtcgctataagtgcggggtgacgctcaagcgcatgttggtcggcaagactgagggcactcgggtgccgttgggtgagagcaagttgtgcaactggggcgataacttctgagccacgtctcgccctcagctgtgcaacggcaacgccaccccgaacaacacgaagaacccgccacagactttattgaaccgccgcccggtgcgcgccagccatggccgcacccggtgcgcggcgctggccaccaggtattcgaccacaaactccaccacggcgtaggtcagcgcgatgatggcggtctgcgtgatgatgtttctgtgggggtcgaggaagggtgggataaacgcggtgaacagcagcagcgccttggggtttgagagggccgagaccaacccttggcggaacagcgaccagcggcgcaggctggtggtagccggggtttccaggctgacgggggcggcgcgccacagcccgtagcccagccagatcaggtagagcccgccggcaatcttcaaggccgtaaacgcggtggccgaggcctggatcagtgcgcccaggcccagcgcacacagcgcaagcaccagggcaaagccgagcacgccgccgctgatggtgaacagggttctgcgactgccgtgcagcgcgccatgggtcagcgccagcaacgcattcgggcctggcaccacggatattccgcagcaggtgatcaggtagagcaaccaggtctcgaagggcatgatcaagtccgcaatgggtggttttggctgctatcttgcaaatgaacaacgaccgtgaaaagcgcataattcacgtcgcagccattcgattaacgaataaaggtcagcaccatgtcttccagcgatttgcagatcgattggctcaagtgcttcgtcgccgtggtggatgccggttcgctgtcgggggcggcccatgaggtgaaccgctcgcagtccgccgtcagcatgcagatgaaaaaactcgaggcggccctgggccggcccttgctcaaccgtggcccgcggcacctgcaactgaccgatgacggccagacgttgctgggctatgcccgtcgcatgctcgccctgcacgccgagacccaggcggcgttttacggcgaggcattgaccgggcgcatccgtctgggggttgccgaggactacgccgccaggtacctcacgccgctgctcaaacgttttgcgccgcgttatgcgggggtggacatcgagctgacctgtgaacagtcgaccgcgctgatcccgcgtgtgcgcagcggcgatcttgatcttgcgctggtgtccagggactcgccgcacacggggacgtttctgttcaaggagccgatggtgtgggtcggctccgcgcaattcgaactatggcgccgcgacccggtgcctatcgccgtctacgaaagcgaaagcctggcacggcggtatgcggtgaattcactggcgcaacagggccgccagttcaaggtggtgtacaacagctccagcctggccggccaactcgcggccgtggaaggtgggctggcgattgctgcgattacagagtgcaccgtgcagccatccttgcaggtcttgagcagcgaacatggcttgggcgctatcgaaccgatggaggtgtcgattctacgtagccgagcttcgcgcggatccaaggcggtcaacagcctgcatgggtttatcatcagtgcgcttagagctcaggcgtagccctggcgcgtcgcgctatctggacaccgaggtgatcccatagcagcctcgctgaagctcgacagctcctacaattgatctgcattcggagctatacatggccctgtccaaacgtgaaaccgttggtatcgaacgccaactggtcgctgcactgactgacgcctgcgaaacggcgaaggctgaaatcccggggtttgaatggctgacccacacggtcaactacgccgacttccctcaaagcctgcgcatcacctgggtcttcgacacccgcgccaataaagaccacgcggtggcgaccgggttggacgcacgcatccgcgaactcacagccgcggccctgcacgacgccgacatcccacccgtgccgttgccgcgctgcgttcaacttgactccgaagaagcctgccaaacccagcacggcggcaattggcgtttgcgcctgacccgctcagccaactagagcctggcgcccaactgctggataatgcctcgccctgctctccgcccgctgaaaaggaaatcccgccccatgaagttgccgctttccgctgccctgctcgcgtctgccctgctgtcgccttcgatggcccacgccgaagacgccgcactggtcgacaccctcaaggccttcacccgctgcgacgcgagttttttcagcagcctgaacacccaccgtgacgcctggcaggcctacgccccgctcaagcaagagaaggacttcagctggatcgcggtgcgcgatcgcaccgaccccaaggccaccgcagtgccggtgagcgcgccggccatcgccggcttgaagttgctgtcgtacaacgatgaggtcagcgatctcggcccgctgggcctgtattacttctggggtttcacggtggacggcaacattgatgaggtcgcgcagcgctttgccgcactgctggaccaacccgctgcgctgcaaaaaggcgaagggcaatacacgcgcagcgagctcaaggtgggcaacagctggcaggcgatcaagccgatgccgggcaaggcgccagggctgcgcaatgtggagcgggtgctgatcgtggagccggagggcacgcactcgcgtgtgagctgttcggtgcagggcggggtgactcccggcttggtcgcactgctgcggccggacattgcgccggtggattacccgcgcacggtggccgagacccatctcgccgacgtgccggtgccgcccactgtgctccagggcctcgacgcgccgctgttgcagcccaggttcaagacgttgagctacacctacctgtcgaagaatgacgcgggcaaggacgcgccgatcacgatccggttcaaggccgagggcggtttgctggtgaagaatgaggcctatggcaacgccttcaatgtggaccgtttaatgctggcagacctgatccagctgaaatcgaaaatgaacggcgtgggcgaaggccaggtgctgcagacccgcgaggccgaggtcaaactaccgaccagttgggcaccgggccagaccctgagtgcgcacctgaagatggccaatgtgccggtcaagcccactgacaaaccgaccgaaaccaccttgacctgcaaagtcggcgagcgcttcccggcgcgccaggtgtttgcgtcgttgacgggcgatgccatccggctggcctgcgagcaggacggctacacgtcgtcgcgcgcgtttatcgaggacctgggggtggccctgacgctggagtcgacgtcgagccagacccactatgtgaatgaaatccagacgctggacgttgtgcgctgattagggctccacgccacgcaagaacacatcgaagcggcgactgatcgcccgttgtgtttagccgcagtcgcactcaacgtgtgatgagccggcttgttgtggtgagcgggcttgccccgcgttgggtggcgcagccgccccaataaatacaccgcattctttcagacagaatgcggtgcctggtctggggccgcttcgcgccccaacgcggggcaagcccgctcgccacaacaagcccgctcaccacagataagtttgaacaaccacagcaagcccgctcaccacaagggattagggggcagttagaagtggcgtatgagcgaaccaaacaggtcgccccggggcatttggctcaacgggatttcggcgttctcgaaccactgcgcactggcttcaggatggggcccgctcagtatcactacgcctttctcgaaggtataccgcgccgctgcgacgtcgccgttgcggtaggtcgcgatggccgtgtagggcgctacctttgggaagtaagggccgtcctggaagaacacctggtcgggcttgccgtcccatgtgacctgcacggcggcgtcggcgctgtcgggcacttcgaaaccggcgcggccagcttcgccgtcgaggtccaccgggatcaagccgaggttgctgtcatccgccaggtaggcgcccatgcacaagcccaggtagcgcccgccgttggccacgtaatcgcggatcgcctcgctgcgcgcatcgcccaggctgcgcagggcgccggggatgtcctggccgccgccgggttgcacgtagaggtcgtagcgcgccagggtttgcggggtgatgtcgatgggctcgtcggcgcccacgaagtcgatgcggtagttggggttgatgcgctgcagggcctttgccacgttttccgaacagtcatcgcagccagccgggccacggtagatggcgacacgggtgataggcgccgaggcttcggccggtgacggcagcaaaagggcaaaggcaaacaacgtggcgacgacagctcgcaggttcatggtcaaggactcctgaaggaccacgcaaagcctatagcgattgcgccgttgaatccgttaacagttgtaaacgacgttgagttggggataactggtggtcgagccccgttccgagagtgcttatcatgtttgaactcaccgccctcatcacctatatcgccgtcgtgatcggcctgttcctgatccccggcccgtccgtgttgctggtgatcacccgcaccgtgcagggcggccgcaaggtcggggtcgccaccggcctgggggtggcgtgcggcgacctgctgcataccctgggggcggcgctgggcttgtcggcgatcctgatgacctcggccaccgcattcaacgcggtgaagtgggcgggcgcggcttacctgatctacctgggcatccgtgcgttcatggccaagaccggcacacagaaggggctgacgttgcctgcggtcacgccgcgccaggcgtttttccaggcggtcggtgccgagttgctcaacccgaaaaccgcgattttcttcctggccttcctgccgcaattcgtgcacccggaagccggctcatcactggtgcagttcgcggtgctgggtttgattttctcggtgctcagtgcggtgtacaccagcctgctcgcgctcgccatccgccccttgagccgaggcatcaaggggctgtccaaactgcggcgctgggaaggaaaaatcatcggcacgctgtttatggggctggggctgaaggtggcgttgcaacagcgttagtcacttggcaaacgcatactccccaccctgctccaccgccttgcgataggcaggtcgggcctggaatgtttctacccacgccgccaggtgcgggtaggcctgcaatttgccctgggccttggcgatttcgccgataaagctcatctggatatccgcaccgctcagctcgtcgcccagcaggtacgttttatcggccagcacgtcgttcaggtaacccaaatagttggccacttccgattcgatacgcggatgcaacggcgcgccggcatcgccgaggcggccgacgtagaggttgagcatcaacggcaacatggccgagccttcggcaaaatgcagccattgcacgtagctgtcataggcagcgctggccgggtccggttgcaggcggccctggccgtgatggcggatcaggtagtcgatgatcgcggcggattcgatcagcacctggccgccgtcttcgataaccggggatttgcccaacgggtggatggccttgagttccggcggcgccaggttggttttcgggtcgcgctggtagcgcttgatctcgtaaggcaggccgagttcttcgagcagccacaggatgcgttgcgaacgtgaattgttgaggtgatggacgatgatcatggcgtgctccgcagggcgagagggatgtcttgggaacagactacgccagcgtccgggagtgccgacaattaaatttcaacgcgacaaacacgcgtggttaccatggggatcgaatccacaggagttccgccatggacctgaagttcagtcacgtcgacatactggtcgaaaacctcgaggaggcctgcgcctattacgcaaacatcctcaaagcacgcatctccaagacctttgtgtgggaacgcggcggtttgcatgtgcgctatgccgtggtgctgatggggcaagagcggttcatgttggtgcagccgattgccgggaatctgcgcgagctgctggacacccacggcgaaggcatgatttaccgtcattgctacaccacgccggacatcgaggtcgcctatgacgagctgatcgccgccggtgtgcagcccgagaatgaaaacggcgtgcccctggcccgcgagaacctgcagtcgccttctggcgggcggattatctggctgcccaagcgcttcgggcacttttccatggagatcctggaagagaagacactcgaggcgtttattgtggaggcgtttggctgatcgacgcccacgccgcctgggccagtaactgcgcgtagtcattcgggctgttcttgacccgcccggacaaccacgctcgggcgtagttttctgccgcgccaatgatcagcgatagcaaaagctcggcgggaatgtggctgaacgcttcagcgcggcccgcctcgctcatccactcggtcaactgccgattgcgctgtttgttgcgggtgagcaattcatccttgaacggaccgttggccacggcgaaacggctctggaacacaaagcgcgcccagtcgggttgcgcgtccacccactccacatagctgcgcaccagtgcctccacgcctgcctgggcggtttgcgcctgcgtcaggtagtgctcacgcaggacggcctggtcctccagcgcggcaaaaaacagcgcggcaacgatgccttccttgctgccgaaatggtggtagatggcgcccacgctggtgtcgcaccgcgcacggatggtttcgatgttcgtggcttcaatacccacttcgttaaagcaggccagggcctcgcgcaggatgctgcgcttgaggtcgctgcgccggcccgggaaggtgcgctcgatcagatcaggtgcgtgcatgaagtcgctcgccaaatgtgcggagtctaaaggtacggcagccgcgagagaaggcatggcttgacactcttgagatttacagaatattgttccgtcacagaatattattctgcaaacctatccggaggaaatccatgagtcagtttctcagcatgttcaacagcgcaggtccagccgccttcagccagatggcctgccaggtggcgccctacttcagcaccatcaaccctgaaatcgccgaactacgcccaggccacgcggtggtcaacgtgccgtttcgcaaggaaatcaccaaccacctggcctcggtgcatgccattgcgttgtgcaacgcagcggaactggccggtggcacgatgaccgatgtgtcgatcccccaaggcgccaaatggattcccaagggcatgaccgtggagtacctggcaaaggccaagtcgaacatccgtgcggtggcggatggcagtggcattgactgggcaacggctggcgacaagatcgtgccggtggatattttcgatgagggcggggtgaaggtgtttacggcgaagatcaccatgaatgtgaagatcgcctgaggccacggcagcaggaggaggacctgacccgatgctgaaaacagcgcaggacaaaatgtgggagggggcttgcccccgaatgcggtgtgtcagtcgctgaatctgttgactggtacaccgcaatcgggggcaagccccctcccacataggatctggtttgtttggaagacagctcagcccaggcggaaccgcgcagtgttgtcactcagtgcctggctgcctttgctcagggtgtcggctgcgcggttcactgcccgcgcaccgtcgagcaagcgcccggcggcctggtcgacttgctggatgttgccactcacttcatccgccgtcgccgcttgttcctcgacggcggtggcgatctgcgccagggtgtcggtcacgtgctgcaccgccccggcgatctcgcccaaacgggtgcccagcccggtgacggactccgcgtccgtcaacgcttgttcacacgcggcgcccatcagggtcaccgcctggctgaccgtggcgcgcaggctgtcgacggtgccggcgatctgcgcggtggaggcttgggtgcgttgcgacaggctgcgtacttcatcggccaccaccgcaaaaccacggccctgctcgccggcgcgcgcggcttcgatggcggcgttgagggccagcaggttggtctgttcggcgatgccgcgaatggtgtcgaccaccgattgaatctgctggccctgctggctgacttgctccagcgcatcggcggtgtcggtcaggcgttggttgagctgctggatgctggccgtggtgcgctggctatcgcggctgctgtcttcagcaatacgccgggtctgctgggcgctgcccgaggcctgttcgcagcttttggcgacgcccagggaggtcgccgccagctgggtcgcggcggcggcaatctggctgatttggtgttgctggtcttcgacttcggtgagggtgctgcccgattgcgaattgagggtaagcaccgccgagccgagctgctgcgtctcgtggttgacccccagcagactggtgcgcagttgcaccaccgccacgttgagcgcggtgctgatggccgccagttcgtcgcgcccttccaccgccacctccacgcacaggttgccgtcgcgcagggactcggccagggtggtgatgccgctggcactgcggcggatcgaagcttgcaggcacatgaacaggtacaacgcggccagggccagcaggctgaatgtcgccgcgacggggacgaacttctgcaacgagcgatcgcggtagtgacccaggcgcgcatccagcgaatcgagggattggttgcgcagcgcacccaggctgtcaagcatgccgtcgacactggtttcgaaggcggcggtgtcgagcttgatggtgccgccgaacacgccgtcgtcgagtactttgagttggttgtccaggcgttgcaggctggtgtcgtactgggtggtccagggttccaggccggcgtacggcttggccttgagcgatgccgccgccttgaccaactggtcgcgcgcatcgccgatacggccgcgcaggtcacgcatctgcaaacggctttgcaaggtgaattgccccgaggcgatggacgactggccgacactggccatgcgtccgatgcgctcgatcaggtccggtgtgtgctgggtggacatctgcatcaacaggtaggtttccagccatgggtcgaggatcaggccggcgtccagggtgatctgttcgcgcagggtttgcatggcggtcagggccgaggtgaaacggtcgtaaccgtccggccaccagcccacggtgcgcagggactgggagtccatgcccttgaccgtggcctgcaacgcttcgaagcgagccagcacgtcggcgccggcatgctgggccttgagtgaatcccccagggtttgcaggctctgcaggatcagcgggaaattcgcatcgaccttgtccatcgccgccttcgccgccggcgtcggggcgtgcaggatgtcggcggctttccagcgcgcggccaggttgcgctgcgccgtcaactggccgtccagcccatccagggccagcagttggcgaacgccggattgctcgctggaaatcacggtcagcttgtcgcgatagtccgcgccgatcatccacaggctgcccgccaggggcagcatgaacaggaagaacagaatctggaacttgcgcgcaaagccgaaccgccccagcaggcggatacccggtgataaaaggctgtgcatgtgcaaacactccccaaaaacgacccaggcggtgcaccgctgggtgaagccttgaaatgactaacggcaaaatgccatgtcattgattagattggctcaagcaagatacgggccgttgacagaggggctggagacaggcgggctcgcgaggtgagggtgcaggtatcgtgctcgaaaatggggcaaaagcactcagcattgaagacccagctgtaactattggcgcagtctgtaataacagcggaattacttcccgctgatcagcacttttctccccgctcacactgaaatctcctaacaccactggagattcatcatggcacgtgcacttaacagctccgaacgcagaaccttccgtgcagctcgctatgccgcgttgcgctcgctcgaattcaccattcatcacttgaacggcggcaatgccgatgtcgctcgggtgtggatgggcgtccagcaacctggaaacctgcaagccttggctcaacgtctgtaccggatttttcaggcactgcagaacattcatgaaggacaggtcaactgcgaacccaacgcaaattggtatgcagaggtccaccccgacgacgcagggcatcacatcacgctggggggtgcattcttcaacgccccgacctacggcaatgactcgcgtgccggcacgttgatccatgaaaccagccatttcaacgatgtgcttggcaccgacgaccacgcctacggccaggaggcctgcctgcgactggtgcaacaagccgagcaaggcgatggcaacctgcacactgtcctggccaacgccgacaactgggaatacctggtggaaaacacctattgagttgcggcagcgacactcggaaaaagcctgttctcggacaggctttttcatccccccactatcaggagttgaacatggaacgtcgattattgattggcgcctcgctggcagcactgtacctgttggcaacaccggcacatgcgctcagcactgccgacgctgaacctgaaacactgaaagcgtatgccgtcacactgaacgctcacgcgagcaagttccagtggcagcaattatggaaagcctcacgtgaacacggttatttcaacaacggttctgctacgtatttcacgacaccgatgccgcacgtgcccgacctggtgtccgccgtcctgaataaggcaacgagcgttaccccctttgcctcaactcgggccacttaccgctatgactttgcggcaaaagtaggtttatccaacaacgtggccgtcacagcgctgtgcgttgatgtggactggcgcacgctacctgatggaaccgatgttgaaaatgcgcacgcgatgcaatcggtaaccctgttgctcgcccaaccctgcccatgatgcaagcagccacccgggatgtccccgggtggctgtatccagagtgttacaacgcactcgccaacaaagcagcttccttgcagcgtcgggtggaatagcgatcgccgaaattcctcaagttgctctcggctgctttccagtccgctgccacaacttgcgcccaaaacttcggcgtacggctcgcaaggttgccgtactggaaggcaaccgaggcgatcacggtttgcatcggcgccggcaatgcatcaaacgggcgtccggcagccttgctgtaatcactggccaggcgctcgatgaagggcgccttgtaggcctcgtcgatcctgcatgcatcctgcacactgacattcaacggcaggcgctcaaggcatgccacggcttgcgcaccgatcaaccccaagtagggtaaaagccgctcgctgagatcctggggcagcatgtccaggttcttttgctggcccaggtcaaagccggtgccgatggtgacgccgctacggctgttttccggatcaggcacgtaaccacgggtggcgctaccgccttcgagccgggcaatgaaggccatatctattgaattattggtcatggtgagtttcctcttggctttaggaaactgcagtccatcactcacgccatccgctcttcagaaggtaaaacttcctcatcttcataggtaaagtttcctactgattattcgcacgcattacttcctaagctctgaccagctctcatcacaaggaggttaggccgatggaatcgaaagacctggaacacatcgatgttcgacaactcccccattcccttcagatgctggttgcctgtatcggtctggaaaacgcattccgcttgacttgcgtatatggcggacgccccaagtacatccccaaacacgcacaacgtacttcgctggcgctgattttatcgccggaagccttacaggcgttgatcaatgatttcgcaggtatttctttagagattccaaagtccgatcatttttttcggcagattcgtaatcagcatattcaaatgggtatttccgatggcgtatcacgtagtgcactggccgagaaatacggactgagcctgcggcaaatcgcgaatattcgacgccaggatatttgtattcatcggtaattacttcctactgaatcagaaagtgccacatggatagattcaagttgcgcactttcgcgcactcacgataaggaaattaaacatggcagatattgataaaggtctcattggaggcgtgatcgccgcacttccactggacaagatgatcaccgggccgctgatggcaatgatccaggcacaagtcgccgccagtaaagcgtacgcggactttctcatgggcgtgtgcatccaggacggcaaggccgtttcggtgcagttcgactatgacgaaaccctcgtcgatgagcaggggatctacaagggcacggtcagcaagaccatgcgcattccactgctggccgcaatcagccaccccaacattaccattgaggaaggcagcatcgagttcgagttgaccatcacccaaatggccgaggacactagctccaatgatgtttccggcagcttcgacgccaagatgggctggggtcctttcagcgtttcagtcaaaggtgccgccagccacaagtcatcccaaacccgcaagactgacacccgcgcacgctacgaaatcaagaccaaaatcgttcgccaagacccgccggaagccttgatgcgcgtcatcgatttcctcaccgatgccgccaccaagccggtcaccctgccgagcgccaccccaaccagcccgacagagcttccaaaagcaggggtactgcctatgcctgacgccaaacctgcggaaaaaaccaaatagtcccaccccgccccgccccccagggcggggcaacccacttgacttgaaaggagctcaccatggcatttttttcgcgccccaaggaacccatgtcggccagcgacttgagccacataacacgcgggctgcaacaggccgctgcggccacgcacaacctgatcgtccatcaatatattgcgctgttcgaccagttcttcgattacaacgttgaagacctgggcacgccgatgaaggccaagatggttgaggtctcgctgaccgaggggcataccatcagcgtgccgctgatcgcactggtcgcaccgaagggcttggcactgcacaagatggatgtagacctgtcggtaaaaatgcacagcaccgaagtgcaaaaagccagccatgacctggagaacggcgacctgcacagcgagaagtttttcgtgacctttggcaccactaagcgtgagggtcaagagcgcgatcccgatgaggtgcagatccgtatcgagttcaaggcgtgcgagccaccggaggcgatcaaccgaatcatcgaggagtacaccaacttgatcagcccgatggcaaacgcgcccggcccttcctccgctaccggacaacccaccgcacaacccccttcggacttcgcaccctaaaggccatgcctttcaaggtctttgaaaaaccggcgatgtctggctgatagcctcccattaagagcgagcactgcaactgtggcaagcccgctcgccacaaaggacttatcgcctgttctacctaaagacttgaaagggctgaccctaaaggcgttttaaagggcctattgcgtcaccctgtaccggtcgaaattattgatgtgatcatccagattatcctcaagcatcatccggtactgatcgcagaagtacttcaacatggcctcccgtgcatcggccatttcagctccggacttgaagttgcgtgcactggcccaggcattgaagcgcgtggtgccaaacatcatcgaggcgctgacctggccgaggttttcgtgggtctggagctgctcgttcgacagctcgatatgcgcgtcggcgcggtcgtagaaagtggggtcgatggcgtctgccatggtggttttccttggtcatcaggtttgaatgagggtagatcaagccagcagcgcggttatccacctggcctgtcgggaaatctcctgccacttgtctggcggcactgcctgccgcgcctgctcgaagctggccagggtcttgtgcttttgctgcaacaggcgctgccacttggcaaggaacgccgggctacgcgcctgcatttgcagggggccgaagtacagctgttcggcggtgtacgccaccggcccggtgcgctcggcgacgatgatttcgtagtagaaacggttctcgcgcagcagctcttcatggaggatggagtaaccgttgtgcatcagccattggcgcagcgcttgttcgccaccgttaggttgcaggatcaggcgttcctggccgctcaggtgcagtttgccgttttcaagaatgtcgcggatcgtctcgccgcccatgccgcagacgctgatggcggtgatgccgtcatggggttcgatggccgccagaccatcggccaggcgcacggtgacctgctgctccaggccgttgtcgcgcacggtacgttgcgccgcatgaaagggcgtggtcgcgacctcccccgccagcgccgccgtgatcgcacctcggcgcatcaacgccaccggcaggtaagcgtgatcggaaccgatgtcggccagtcgcgcgccagccggtacgttggcggccacgcgctccaggcgctgggataaggtgtgttcgttcaacggccctgctccccggaaaaccgatcgcggctgttggtcaggtgcaacaccatggcggcgcgggcggcatccgggtcctggcgcttgaccgcgttgaagattgcctcgtgctccaggttcgccaactgccccagcttggcaaaatcggcgccgccacgttcatcgttcttcacctgggtacgcgggatcatcgcattgcccaggtgcagcatgatttcggtgaagaaggtgttgccggtggcctcggcgatcagttggtgaaaacgtttgtcttcctccacgcagctgtcgttattggccagggaagcctggtagtcgtccagggcctggcgcatgtgagccagttgggcgtcggtcctgcgaaccgccgccagagcaacggcttgtacttcaaggcccaggcgcaactccagcatgttgcgcacgctggccaccgtgtccacgtgcaagcgcaacccctgctgggcctgctgctccaacacaaaggtgccaataccgtggcgggtctcgaccaggccggacgcctgcaacttggagatagcctcgcgcaccaccgttcggctcacgccgtgttcgcgcacgatggtggattccgagggcagtttttcaccgggtttgagttggccgagcaggatgcgctgggtcaacgcgtcgaccacgccttgggccaggttggtggagcgtctgcggacagagcttccattatcgatgggcatattacgtgtccacagggttgagcagcggcaagcttaacattcccacctgcccgtcgcgtcttcaggatgtttgatgtcaaaaaaacaatccacttgtatgacaacacactaaaaacgcattttaaaaatcaaaaaaccccaatactgttgcgaaaaaaataaatcaacttgtatgatgtctatcaacaagacacacacacccgcataaaaacaatcagggggagttttgaatggtgaccacttcaagccacgcatctgccacacccgaaaatgatccagtcctcacgcgcgccgtgagcaaagtgaagggccatgtgctcccactgttcgtgatcatgttcatcctcaactacatcgaccgggtcaatatcggctttgtgcgcacgcacatggaacacgacctgggcatcggcgctgcggcctatggtttcggcgccgggctgttcttcatcggctacgccctcttcgaagtgccctccaatatgctgctgcaaaaggttggcgcacgtatctggctgacccgcatcatgttcacctggggcatcgtcgccacgctgatggcgttcatccagaacgaaacccacttctacatcctgcgcttcctgctgggtgtggctgaagccggctttttcccgggggtgatctattacttcacgcgctggttgcccggtgtggagcgtggtaaagccattgcgattttcctcagtggctcggcggtcgcgtcgctgatttccggtccgctttccggcgcgctgttgcagatcgaagggtttggcttgcatggctggcaatggatgtttgccattgaaggcctggcctcggtggcgctggggttctttgtgtggttctggttggactccaaaccccacgacgcccaatggatgacccgcgaggaacaggacgcactggtcaatgccatcgaccaggaacaacgcgaccgcgaagccctcaccagcgtcaagccgaccctcggcaagctgctcaaggaccgccagatcctgctgttctgcgcgttgtatttctgcatccagctgacgatctacgccgctaccttctggctgccgagcatcatcaagaagatgggcgatttgagtgatgtgcaggtcggcttcttcaactcgatcccgtggctgatctcgatcatcgccatgtacgccttcgcctcgctctcgggcaaattcaagttccagcaggcctgggtcgcggcagcgctgttgattgcagcggcggggatgttcatgtcgaccaccggcgggccgatcttcgcgtttgtggcgatctgttttgcggccatcggcttcaagtcggcgtcgtcactgttctggccgatcccccagggctacctggatgtgcgcatcgccgctgcggtgatcgcgctgatcaactccatcggcaacctgggcggctttgtggcgccgaccaccttcggtttcctggagcagaccaccggttcgatccagggcggcctctatggcctggccggcacctcggtgctcgccgcgatcctggtgttctttgccaagacgtccccctctgccgcattgaagccagcgagcggcgtgcccaccgccgctctcggcaaaccactttgagcccagtcaggaacctgccatgaatactcccgtcgttacgcacttccaggtcatccccgtcgccggccacgacagcatgttgctcaacctcagcggcgcccatgggccgtacttcacgcgcaatatcgtgatcctcaaggacagctcgggcaacaccggcgtcggcgaagtgcccggcggcgagcgcatccgcgaaaccctggaggacgcccgcagcctggtgatcggccagcctatcggtcagtaccagcgcatcctcaaccagatgcgcagcgcctttgcttcacgcgacgctgccggccgcggcctgcagacctttgacctgcgcattactatccatgccgtcaccgccatggaagcagcactgctcgatttgctgggccagtttctcgaagtgccggtggcggccttgctcggtgaaggacagcagcgcgatgcggtgaaaatgctcggctacctgttctatgtcggcgaccgcagcgcaacccccctcgcctaccgcaacgaagccgacagcgacgatgactggttccgcctgcgccatgaaacagccctgaccagcgacgccgtggtgcgcctagccgaagccgcccaggccaaatacggtttcaacgacttcaagctcaagggcggcgtattgagcggcgatgccgaaatcgaagccgtcaccgccctggccgaacgcttcccggacgcacgcatcaccctcgacccgaacggcgcctggtcactgcaagaggctatccgcctgtgccgcgaccagcaccacgtactcgcctatgccgaagacccctgcggtgccgaaaacggttactcgggccgcgaagtcatggccgaattccgccgggccacgggactgaaaaccgccaccaacatgatcgccaccgactggcgcgaaatgggccacgcgatccagttgcagtcggtggacattcccctcgccgacccgcacttctggacgatgcagggctcggtgcgcgtcgcacagatgtgccatgaatggggcctcacctggggctcgcactccaacaaccacttcgatatttccctggcgatgttcacccaggtcgccgccgcagcgccgggcgatattaccgccatcgacacccactggatctggcaggacggccagcgcctgaccaaagcgccactgaaaatcgaaggtggttacgtgaaggtcccaagcaaaccaggcctgggtgtggagatcgacatggacgcggtggcccaggcccacgaagtctacaaaggcatgggcctcggcgcgcgggatgacagcgtggccatgcaattcttgattccggggtggcgcttcaacaacaaacagccgtgcctggtgcgataaacgcccacccactgtagaagcgagcttgctcgcgaagatcgccaacgaaaaacgcgccccccccctgggtaaacgcgctgcctaggttttcttcgcgagcaagctcgctcctgcaattggctgcaccgtcagctcgacgcccaaggccagcatcagcttctggatcgtttcatagcgggtcttcgagccgcctttcaacgttttatacaggctctcccggttcaccccagcggcctcggccaccttgttcacaccttgggccttggcaatctcggcaagcgccttcatgagcacctgcaggtcttgagccttcatgctctgcgccagatacgcactgatggtttccgggctgtcgagaaagcgcgaagcctcatagacgctggttccggacgtatccagatcgaggatcggcatgtcctcgggtttgaatttcgattcgctcatttcatttacctctcagggcatcgagaatctcttttgcccgcttgatgcctcttttctggtcagtcttatcactgccccacagcatcaagtaagcggtgatccccgtacgcacgaaatacatcctgtaaccaggcccgacgaacacacgcatttcactcatgccgtcgcctaccgattcacaatccccaaaattgttttcctccgctcggtccaagcgggtcagcaccgccgttttcccccagatatcccgcataccgtcgagccatgtatcaaactccggcgtcctgccgattaaattagtcacagtatcacttgtagcctacaggctaccccttgtcgatgccaatggatttttgtttccggtgagcgccggaataaaaaaccctagttcagcacccgcacaaacatcggatggatactatgagtgcttgtttccccagtgtttaaagcacccgatcaaacaacggcgccacgtcataccgctgcttcaacatctgtgcatccaccaaaaaatccgccgtggcctgggcctcgctgacaattgtcggcgagatcggcagcaccttgatcgcatcgcgcttgaaccacaccttggcaatctccggtgccgactggttggccttggaccaggcttcggcgtattcatcgacgtgggtgttgctccagactcgggcgcgagtcaggcgggcaatgaagtctttgatgatcgcgcttttctgcgccagggccggctcgtacgccacgatgtaggtcggcgcactcatcaggcccttggcgttgcggatcagggtgctgccttctttttcctgcagtgacacgtagggttcccaggtgccgaaggcgtcgatgtcgccctgggtcagcgccaggctggcctcggccggcagcaggtatttgaagttgacgctgctgcgcggcacacccgcttcatccagcgccttgtacgccagttgctggctccatgagccgttccagatggcaacggtcttgcctttgaggtcggccaccgagtgaatgcccttgcgtgccacaatacccacgccgtcgaggctggtctgggtgctggcgacgactttcaccggtgcgccgttggcggccaggctgatcaccggggtgtcgccgacgatgcccacatccagcgcgccggtggccacggccgaggccaccggggagccggtgttgaagcgcttgaagtcgattttgtaaggcaagtccttcagctcgcccgacagctccagcacgatgcgattggagaagaactggtcacccacgacgagagtcaacggctcagcggcgctggccgacggaccatagagcgcaagagaggccacgcccagcaaggacagcagtgttcgacggttgatcatgaaaaatcccacagggttagagggttggtttaaccatctgtgggcatgcagtctggtcgcttgaggtagaagctaacgcaataaaagcgcggggtttaatactgttgggcactatcgatagaaccgtcccacaggtcgctagttgcttttcgtattaaaaccttcgccgcccctgggttagggtgacgtcaccagaccactggaccccagcacctgaaccactttcagcaaggtccattgcatgtcgattcccgctttgaatatctggggcgctccgcccactgcccgctacgaacaattggccgcgccgtttcgcccactgtttgcgcagattctcgcgcaggccgccgaggcggatcagacacgcgccagcctcgccacggtgatccagcaactgaatgccctgggtttgccacgctggcgcctgccggccagttatggcggccaggatgcgagcctggtcgagctgctcacgctgctcactgaactgtccgccgccgactccaacatcacccaggccctgcgcggccactttggtttttgcgaagacgtactcagcgccaaggacctcgactggcgcgccaagtggctggaccgcctcggccaaggcgccctgctctcccccggcagcaccgaagtcggcaacggagcccgtggcgacttcgacacccgcctgcaccgcgatgccgccggcgcattgcgcatcagcggcaagaagttctacaccaccggcgcgctctacagcgacctgatcaataccattgcaaccggtgaaaacggcaccgtgtatacggttgtcgtcgacctgaaagccccaggggtaaagatcgtcgacgactggaacggcttcggccaacgcctcaccgccagcggcacgtgcattttcgacaacgcaccggtggtggacgacgacgcgcgccccacccaacagcgctttggtcacgggcagtcgttcttccagctctaccacctcagcaccctcgccggtatcgcccgacgcgccgccctcagtggtgccgaagaactcagccagcgcgcccgcaccttcaccaccggcaatgccgacacggcgagccaggacgtgcagctgctacaggtgattggtgaagtcgcgagccaggcctacgccgcgcaagccatcgcccagcaagcggcccggcgcctggagtacaccgcgcagtatgtgattgcccacgaccagccactgcatgacgatgacccgcaggttgcattggccgagctggaagtgtgcctggcggtgaacccggtggtggatgcgacgctggccgcgaccacggccttgttcgatgccctgggcgccagcgccactgccagcagcaaggcgctggaccggctgtggcgcaatgcgcgcaccctggcgaaccacaacccgcgtgtgtacaagtcgcggatcgtaggcaattacctggtcaatggagtcctgccgcctgcgcagtggcgggtgggtgtggcaaaaagcactgacagttagagggcacaacaaagatcaaatgtgggagggggcttgcccccgattgcggacatccagtcactgcattgttagttgacccatcgccatcgggggcaagccccctcccacaggtaacctacacgctcacaaacttcagcacccgcgccaacatccggtcacaggcctgcaactgctccaggctgatgaactcatccggcttatgcccctgcgccatactccccggcccgcaaaccaccgtgggaataccggcctggtcgaacaacccgccttcggtaccaaaggccaccgtgccaaaatccggcgagccacagaactgcgccacccactctgcggcctggctttctggcgacgtggccagccccggataactggacaactcgctgaggctgatcgccgattgcgcactcactgcccgcatcgccggcaacaaggattgttcagcgtagtcgcgcagttgctgcaccacctgccagggatcctgggccggcagcgagcgcacttcaaagtcgaaactgcactcctgcggcacgatgttcaatgccttgccgccgctgatcaagccggtctgcaccgtagaaaacgccgggtcgaaacgcgcatccagatgctctggcgccttgagcgtttcgccgagccgcaccagctcgctgaccagccgcgccgcgtattcaatggcgttcacgcccgccggcgcgtacgccgaatggcacgccgcgccatgcacctggcagcgcatcgccagcttgcctttgtggccaagcaccggtttgagttcggtgggttcgccaatcacacacagcagcggcttgaccggctgcccgtggaaccgctcgatcagcgagcgcacgcccaggcagccgacttcctcatcgtaggacagcgcgatatgcaccggcatgcgcaacggcgcctgcaccaacgccggcacgcatgccagcacacaagcgatgtagcccttcatgtccgccgtgccacgcccgtacaacttgccgtcctgttccgtcagctcgaacggcgccacgctccaccgctgcccgtccaccggcaccacatcggtatgcccggacagcacgaagccgggcacctgcgccgggccgatggtcgcaagcaaattggccttgctcttgtgtgggttgtaaaccagttcacaggccacgccgtggtcttgcaggtaagtgcgcacgaagtcgatcaaggccaggttggattcgcggctggtggtgtcgaaacgtaccagttgcgccagcaggtcgcggctgttcatcggtcatctcccggcaccgcataacccggtgcgatctgcgggttgagggcgcggtcgatgtaatcctgcagttgcccgcgataggcttgccagagttggtcgagggcgcggatcgggtccatatcggcccaatccacgcgcagattgaccaccggccacagcaggtcatcgacgatcaccagcgccgccgaatgcaccggccccgcttcaccaccgcctgtcacaccggcgtgcatcgcggccagcagccggtcggccaggtgccccggggccgcttcgaacgccgccaccatggcctcgatcacccctgcgtgggccaacatgttgcctgccgccacgcagccctcaccgctcactgcgtggtgaatgcccagggtctgcgcaccgctgaaatgcgcggtgcggcccaggtgatcaatcacgctgacctggcgatactcgctgtgatcctgaccggccagggtcgccagtgcttcactcggcgccaggccctgctccaataagtccagcacctgtggccccaggcttggcaaggtgatgttctgcgacgccaccgcgcccacaccggggcgcagccaggggcaacgcgcacccacggcaatgctcgatgagctgatcgcaatgcccaactggcccgtctcggcgcagcgggcgacaacggaaaacgtcatggggtgtcctcagtcgagcacggaagggtccgcggcgatcatcaactgcttcatttcttcgaaatgctggcgcgaaaagtcggcgatgccttcccagccgcgcgcggttttttccgccacgtcatcggacagcactcgcaacggctgcccggtggaccaggccgtgacgaggatctggcaggaacgttccagggtccagatgtcgtcgaaggcttcaccgatggagccagccgtgaccatcacaccgtggttgcccatcaacaagcgcgtcttgccgtcgagcagcccggccaggcgcgcgccttcggcctcggtgtcggccatgccgccgtacagctcgtccacggccacgcggttgaagtagcgcgcagtgttctggtcgatcggcgggatgtgcggcctggccaggcacgccaccgccgtggtgtacaccgggtgcaggtgcagcaccgcacgggtctgcggcagcagccggtggatctgcccgtggatcgaccacgccgtggcatccacgttgggatgatcggcacaggcggtgtcgtctgcgttcagcagcagcagatcgctcgcgcggatacgtgaaaagtgcttccacttcgggttgagcaaaaactgtttgccatcggccgagacggcggcgctgaagtggttggccaccgcctcatgcatgcccaggtgggcgatgatgcgaaaggtcgccgccaggtcgatgcgcgtctgttcttcgtgggataacgccatggatcggactccgcagggcgcggccgcaggcgaatgcggcacgcgcgtgtaggtttacttcggcatcaatgcggcaatgtcggcatcggtcggcgcctggaagttgtacttcttgagcagggcggcgtactccggcgtggcgcggtatttgtccaggccgtcgagcagggcttttttcaccgtgtcattgcctttcttcacaccgaagccgttgagcaccgggtagatcaaggtgtcggacgagatcaccacgcggctgccgagcttgtcgatcacgccccgggccacggcggcgtcggtgatctgtgcttcaaccgcgtgggccagcagcgcctgggtggtttgcgggtcggtgctgtattcgctgatctggatcggcttcaggcccttggccacgcagtattcggtggacagcttgttcatctgcgccagccacgaggtggcgcccatggagccgatcttgtggccgcagaactcctccggggtcttgggctggaagctgctgtccttgagggtcaggatcgactcgccgctcttgaggtaagggatcatgtcgatgactttgacccgctcggcggtgatgtacatcgacgaattggtcacgtcgaaacgcccggcttgcaggccggtgatcaggttgggaaagcgcgtatcgagggtctcgaccttgcggcccatgaccttgcccaggccgtccatgaattcgatatcaaagcctgccggcttgttgttatccatgtactcatacgggaagaacgtcacatcggaaccggcgatgatcttgccgtcctgctggaacgccgaagcggccagcgaggtcagtgcaaccgctgcgcccagcaggcacacggcaaggggacgaacacttttacgaaacgctgtcatggtgattacctgcaagggtttggggggttaggcagtggctgaatcttgtcccgcctgttgaacgaagaacgacgcgccacggggtttctgcggcaagcgcatgtggttgtgggtggaacgcaccaggccactttcttcaccggccaccagcaggccggcatgtgcgctgggcaacgggttttcgccgaagggcagcgcgtcttcagcggcatagacactgatgaacagcgtgcgcggcagttcggtctcgttagggctggaagcatgcagcagccgggtgtgcatgaagcacaccgagccggccgggccgtaacaggccaccggctgctggcagtgttgcgcgaccacgctgtcgtccaccgagccggtgaaacgctggttctgccagtgcgaccacagcgggcctttgtggctgccggggatcacgttcagcgggccgttctgcggcgtcacttcgctgaccatcagcaaggcggtgacgatgtcgtcgttgctgtggggcgtaaacaggaagtcctggtgccacttcacctgggtcgcggtgtggggcagtttggagttgatcttgctgtggtgaaaacgcgtgccctgggcgccgatcagttgcgcggaaatcgccgccatgcgcgagtgcaacgccacgcgctcatacgccggcgaaatctccgtgggcgagctgacccggcgcagcgacgggtggtcggcgcggtggtcaccctccaggtcaaagcgctcacggccatcgacggtggcgccccagccccggtcatgactgcggctttcttccacccattggtcgaagtcatgctgcagcgcggccacttcatccagtgacagcacgccttctaccaccaggaagccgtcgcgctggaattgttcgacttgcgattgctcgatcattttagtgtttcctgaacgttaaacagatcacgccagcgagacgtccttgaggaacgcctccacgcgtgggttgtggccgctgcgcagggcgcccggcgtgtcgtcgcagaccacgcggcccttctccatgaacacgatgcggtcggagaccttgaaggcgaagttcatctcgtgggtgacgatgaccatggtgatgccctcctcggccagggcttcgatcacctgcagcacctcgttgaccttctccgggtccagcgccgaggtgggctcgtcgaacagcatgatctgcgggcgcatcatcagcgcgcgggcgatggccacgcgttgctgttggccgccggaaagctggtgcgggtacttccaggcgtggtcgagcatgccgaccttgtgcagcagcgcgtaggcctgttgcttgagctcggcggtcgcgcccaggcggtggtatttgggcgccatcagcaagttgtcgagcacgctcaagtgcgggaataggttgaagctctggaacaccatgccgatgtgcaggcgatgctcggcgtgttcgacgtactggggtttctgcgcgccgactttgttcaagtgaatgaagggctggccgttgatcctgatctcgccgttatccagttgttccaggccgttgagcaggcgaatcagtgtggtcttgccggagcccgacgggccgatcaccgacaccacttcaccgggctggatctgcagattcaccgagcccaacacctcgatatcgttgtaggccttgtgcaagcgcgtggcctgcaacgccgactcgccattattggccgggcgcgccaaggcggtgcgctgttgggtcgccagggccaacaccgccgcatcgggcatgcgggacacgttgcgctggttgacgtcgagaaagcgctccaggcgtttgagcaggaagtcgaacaccgtgacgataaacacgtagaagaacgccaccgccgccatggtttcgatcaccaggaagttctgcgaatacaggcgctggccgaccatcaggatctcggtcagggagatcaccgacaccaacgaggtgagcttgacgatagagatgtactcgttggccagcgacggcaaggccacccgcagcgcctggggaatcactacgcgccactgggtgccgaagaacttcaggccaagcgcccgcgccgcctcgccctggcccttgggaatcgacagcaggccaccgcgatggatctcggccacataggcggtttcgcagatcaccagcgccaacaggccggaccagaacgggtcggccagcaccgccgaggtgcccggcaacgcttgcggcaggttgtagataaagatcagcagcaccagcaacggcaggctgcggaacagccagatatagccgcgagccggcacgctgagcagaccatgtcgggattgcttggccagcgccagcagaaagcccaggccaatgctcaacacccaggtcagggtactgagtttgatgaccgtccacgtcgcgcgccagaactcggcatcgcccagcaaaccaaacatgtaattccagtcgaatgtcatcgtcgctgtgccctgagaagttgatctacatcgatgggttcagagtcgtggcgggaggcggttggggtcaattcgtaaaagccggggcactgggtaggcagaacctatgcagtctgaaagcaaccaaaatccaatgtgggagggagccccctcccaccattggtgcaggcttgaatcggccgtattgcgcacgccacttattggtgcaacctcagctcacaccgctcaacacccgcacggcatgcggatcaaaaaagcttggcggcgccatgccggggatgtactggtcggacacaaacatgcggcagcgctcggcaaacgccgacaccacccgcgacaactgggtgttgctggccgtggcgtagcccaggcgcatcggccggtgcgcacccgccaggcgcaggcggatgacgcgcttgccgtcctgggacatattcgatttgggccgcgcattcgcgaaggaatagccgatgccattgcccaccatggcgcgcaccgtttcaaggttggtggagcgcatgatgatgttcggcgtggtgccggcctggatgaacaggctgaggaaatagtcacgactccacggcgtgtcgagcagcaccaccgggtaggcctccaggtcctgcatgctcacggccggcgagttcgccagcgggtggtactcgcccaccatcacgtagggcggcagttgcgccaggggttggaagtcgatgtccgggctggtcaccaggtcgtaggtcagggcgatatccagctcgccgctgcgcagtttttccagcagctcttcatggttgccctcggcttgcgtcagccgtacgccgggaaacgcacggccgaaaccgaacaccagctctggcgtgatcatcggcgccagcgactccaggcagcccacgcgcagcggcccgcgcaccgtgttcaaggactccgaggcgatggtgtagaggttggtcatctgttccaggatcagcttggcttcctgcatcaccaggcgccccaccgccgtgagggaaatgccctgggcgtgatggcggataaacagctggatgcccagctccgcctccatatgggtgatcgccgccgagatcgacggcgacgacacgtgaatgcgctcagcggccgcactgatgctgcccgcctctcccgacgcgacgaaatactccagttgacgctgagtaatacgactgagcatgacgcctgcccctcaacaatgactgtgcaggtggtgttgcagggttcgtgccgggtcaggcgcaaaccgatgacctgcatgggcttcggtttttcctaagcactaccccgcgcaaatgctggtttcgccgcaaccggggcggtgtgaagctggatctatcccgcttcccacgagctgccgttatgccgacccacacccgtattcgcatgttcaatacccgacagacctaccccaaccaggcgctggacaacgacctgtgccaggccgtgcgcgccggcaacaccatttacgtgcgcggccagatcggcaccgatttcgacggcaacctggtcggcctcggcgacccgcgcgcccaggccgagcaggcgatgaagaacgtcaagcaactgctggaagaagcaggttcggatttgtcgcatatcgtgaagaccaccacctatctgatcgacccgcgctaccgcgagccggtgtaccaggaggtgggcaagtggctcaaaggtgtgttcccgatttccaccggcttggtcatctccgggctgggccagccggagtggttgatggagatcgatgtgatcgccgtggtgccggacgattgggccgtatgaacacgctgattgcctggagtgccccatgacccatcgtgtgtttttcctcaacgggcccaacgccaacctgtatgggctggataaaaacggcacctatggcagcgaaagcttcgccagcatcgacgcccgctgccaacgccacgccgccgcgctgggcctgaggctggactttcgccagagcaaccatgaaggcgtgctggtggactggattcaggaagcacgcctgcaggccgacgccatcgtgatcaatgccgccgggctcagctacagctcggtgccgatcctcgatgcgctgctggcgttcgacggcccgatcatcgaagcgcacatgagcaatatctggcagcgtgaaagcttccggcaccactcctacgtgtccagggccgccaccggtgtgatcgccgggttgggggcgctgggttaccaactggcaatcacggctgtggccgaattgctaggccaaaccgcctaatgactgttcaggaaccgcctatgtccgtcgaaaaaatcaacaccctggtcgtcggcgcaggccaggccggcgtcgccatgagcgagcacctgtccctgatgggcgtgccccaccttgtgctggaacgccaccgcatcgccgaacgctggcgctcggaacgctgggactcactggtcgccaacggtccggcctggcatgaccgctttcccggtctcaccttcgaaggcatttcgccggaagccttcccgccgaaagagcgcatggccgactacttcgaggcctacgcggataagttgcaggcccctgtccgcacgggcgtggaagtccagtcggtggaacgccatgcagggcgccccggcttcaaggtcaccacctccgcgggtgtgatcgaagccgtcaacgtggtggccgccaccggcccgttccagcgtccctcaatcccgaacatcgtccccgccagcgcagcgctgcaccaactgcattcctctgcctacaagaaccccggccaactgcccgaaggcgccgtgctggtagtcggcgccggtgcctccggctcgcagatcgccgaagaactgcaaaaggccggcaagaccgtgtacctctcggtgggcgaacactaccgcccgccccgcgcctatcgtggccgtgactattgctggtggctgggagcactgggcttgtgggatgaagtcaaaatccagccgaagaaaaaacacgtggcgtttgcggtgagtggctatgaaggcggcaagacggtggactttcgccgactggcccaccaggggattcagttggtgggtgtcacccaggactgggtggagggcgtcatgacgtttcaaccggggttggccgagaacgtggctgaaggcgaccgcgcttactttgacgtactgcgcgatgcggatgcgtatatcgaggccaatggcttgccgtttccgccggagccacaggcctgggaattgttgcccgatccagagtgtttggtgaatccgatgttgaacctggacctggctgaagcgggcgtgaccacgatcctttgggccactggcttcactttcgatttcagctggttgaaggtggacgcgttcgacgaaaaaggcgaaccgttccacaagcgcgggatctcggcgcaaagcgggatttacttcctgggtttgccgaacctggtcaaccgcgcatcgtcgtttatctatggggtttggcacgatgcgaagtacgtggcggaccatatcgtgttgcagaacgcgtacatggcgtacgacaagtcctaagacgctcagggcaggtcgaccgcaccttgccccgttgcctacagttgcgtcagaatccgccggcttgtgcgcttgggtgggtgtctctaacgtggctcggtcgctgaacactcagtgatcgggtttagtagcccgagtgacaacataaagtgcatgagcctcatcgatcagatgttcttgtctgtgcttgatggtggctgtgcgcagggcgccctcgggcgcgccggctttgtgtgtttccccggtctactaacctgcgtacagctgccaccctctcgtttagtagcgaaaaggtggtggccctaaaacaggtacaacacacatgttcaaagtcacacccaaccctccaaacagtctggacctgaaactgaatcaggcggcgcaccgtgcaattgatcactacctcaacaccggcgccgaaccgccagagccacctccaccgccatcgacaacgctgttcagcatcgccaacgacgccagcaacgagaccttgatcgtcaacagctacgaaaccttttcctcggtgagcgccttgctgctcgacctgtcggaggcgttgacggggaaacagcgggatgtggcgctggccattcaccagttgagtgagttgggggttttgttggtggataagctgatggagcgcgaagctgatcaaggtctttgagaaaccggccatctccggctgataccgccccataagggcgaacactgcaactgtggcgagcgggcttgccccgcgttgggttgcgcagcagccccaataagagcactgcagtgtgccagacagctccgaggctatgttttggggctgcttcgcagcccaacgcggggcaagcccgctcgccacagggtacttatcgccagttttacctaaaggccttgcgtgctttcagccacgcttgggtagcttccaattcggccgaataaagtggcaggtatagccattgggaatccgctccagataatcctgatgctccggctccgcctcccaaaacggccccgccggctcaatctcggtcacaacacggcctggccacaatttcgatgcatccacgtccgccgccgtgtcctcggccacagcgcgctgctgctcgttcaggtaataaatcgccgagcgataactcggccccaggtcattgccctgccggttaggcgtgctcgggtcatggatctggaaaaagaactccagaatctgccggtagctgatcaccgccgggtcgaacacgatttcaatcgcttcggcatggttgccatggttgcggtaggtggcattcggcacgtcgccgccggtgtagccgacgcgggtgtgcagcacgccggggtagcggcgcaacaggtcctgcatgccccagaagcaaccgccggcgaggatggcggtttcggttggtttggtcatggtctgcccttgcgttcagtggatacccgcctagttatggggccgtgttggccaatagcaagattcacggtttgttacgcagtgcgccagcacctcagggtttgaagtttttcatcagtttgaacaggtggccgggccagatccagcgtgactggggcgggtcgcgagtctcatcgagagcgtccagaaaggttttgttgggcacatcaccgtcaggtccattcacgtttggacgcgggagagttggatcgtttggcgggtcctccggcttatagacccgatgggtggctgcatccagcacgtaaccggcggccttgccgtactcagtgaggctccagacaccgtcgatgacttgggagactgcctttgagggtggaagcttgatgtccttgtgcgtggtggtgacgatatggtctgcagttttggcgtgtttgaaggtggcgtactcgctgccgagtggaggttgatccgcgccctcgtcggagaattttttcaccatacgttccaggaacggtatgccgccgatgtgggtgaacgcgcccatgcccgggttcaggatgtgtttcacaaagccagggtcaacacgggtgctgctgagcgctgaactggtgagtatgcgtgaggcgatggcctcgtcctctggcttgtaattgaacgtcgtccaatacccgtctacgtaaaagccattggtggctatgtattggcgaccgtcgctggagcgtcgatactcgccgagtgcccagaccaaaagatcaacgtggcctaaatccgcaccttctgactgtagatatgcatacatatccgcgaccaaggcacgatcatcgaggttgaggaagtcgcttgctctttgaagggcattcactgaagtggccggtggaaggccgacggggggttctctaccgccaaacacgcgcgaaatcatgatctcacggccgacactggcagcctgccccgaactagaaccgcctgaaggctccatcgacttggccgtttgccacgccacccttcgctcattgaccgtgaaggcgccgccgttgtcgcgggcgatcaggttgagttgatctcgcccgagtcccttgaaggggttgctgtcatgaccgttgaggaaaccggtcgcttgtcgcgcacgggccaggagttccgggttattggccgttggaagctctgcgtcgtgttgtgccttgttggcgaaatactgttcgtcggtgatgggttcgagggggttggcgttcttttggcccgtgggcgcctccgcacgctgtgccgcatcactcaattgacgcgccaggattgagacggtcgtggtgccgttattacttgaagcaatgggcgcatcacgttcaccgccatcaagcgagatagcggacggagtagcaccgctgacggaatcgcttgtcacgcgactgttggacgatggcgtataaggactgatagtgaccatttgtcttcacctagcctctattaatccgcctgactcacggacatggaatgcagtgcgccggcacctcagggtttgaagtttttcatcagtttgaacaggtggccgggccagacccagcgcgactggggcgggttgcgggtgtcggcgagggcatccagaaaggtgttgttggaagcatcaccgtcaggcccgttcacgtttgaaaccgggtgagttgaaacgctgcgtggttcctctggcttatagacacgccggttagccgcatccagtacatagccggtggccttgccgtattcggtgaggttccataccccgttgacgacttcgaagagggcctcggaggggggaagttttatgtccttgtgcgtggtggtgacgatatggtccgccgccttggcgtagttgaaggtggcgtactcactgccgagggggggttgatccgcaccttcactggagaattttttcaccatacgctccaggaacggtatgccgccaaagtgggagtacaccccgatgcccggatccaggatgtgcttcacaaaaccctggtcaacacggctgttgccgagcgctgaactggacagtatccgtgaagcgatggcggcgtcctccggcttgaaatcgaacgtcgtccaatactcatcgacgtaatagccattattgctaatgagttggcgaccgtcgctgaaataacgatagtcagcgagtgcataaaccaatcggtcgacgtgacgtagatccgcaccttctgaatgtgcataagcgtacatatccgagatcaaggcacggtcatcgagggtgagaaagtcgttgcgattttgagtgccgttttcaaaggtcgcgggtggaagggcaacgggtggttcgtcattgtgaaacatgcgcgaaatgaagatctcacgaccgttaatggggaccagcgtgggattagaagcgcctgaaggcgccatcgactggacagtttcccacgccacccttcgctcgttaaccgtgaaggcgccgccgttgtcgcgggcgatcaggttgagttgatctcgccctagtcccttgaaggggttgctgtcatgaccgctgaggaaaccggtcgcttgtcgcgcacgggccaggagttctgggtcattggccgttggagtctctgcgtcgtgttgtgccttgttggcgaaatactgttcgtcggtgatgggttctagggagtcggcgttcttttggccaacgggtgtctccgcccgctgtgccgcatcactcagttgacgcgccaggattgagacggtggtggtgccggcattacgtgtagagaggggggcatcagcctgggcgttgtcaggcgagactgttgacggaataacaatgccgccggattcattcgtcacgcgactgttagacgaggaggtattagggctgatagtgatcattagtattcaccttgcgtagggcatgtgaatggtcatgtaaaagtttcttgcctatccaaatacccgcagccaaattcgctgcgggcatcacaccacacactaatagctatatttaattgtcacagcatcaacgccggcaggacgagcgtaaggtggagcgccacccaataccgtatgaaaaatcgtaacttttgaaccatgaccgaagggctggctattaaaatccatcagcacacccgaagaactcggaaagatatcacgacaatctttttcggcactgaaggagcgaaagtaacacagctcaaccttctcactgagtgtcccaggatagtatgttgtactccaccgaacttctgatatctgcttgggatactggagtgttcctgatggaatatccgcagccagcacactaaagtttgcgaattcacgacttggcacagtattagaattagacaaaaccaatacgggagttggcgccaccgttttagtaaaaacgccctccgccgccaacaccacatcctttgtaaaaaccgccaacacaacacacacaacaagccaaactttactaatgcttttcgagctcttcataatcttcaccctagttcataagtgagcacctgaggttccaatcattccagcagtaggaatcacaccactacccttgcacgatttttcaattcaagtaaggcacccgcttcctaaaaacatgaagcccttatctgtaatacttacaagtaggactttgtcagtaacttcctagtcccgtctcccctctattaaaaacccctgctccaaggcatgatgccgccctcacatcaaggacgataaaaccgtgaaaaccaccctcaccgcgctgctgttgattggcttggcgatgcctgcattcgccgataccaagcccatcggcttcaagaacatcaacgtccctgatgcacaacgcccgctgcaaatggtcgtctggtaccccgccgccaccgcagctacgcctgagttgatccgcgatgacgccgtgtttttcggtgccttggcagtgcccgatgcgccggcagcgagcggcgaacatccgttggtggtgctttcccacggctacggcggcaactggggcaaccaggtgtggctggccagcgccctggcccatcaggggtatatcgtggcggcggtcaaccatcccggcaccaccagcaaggatcgcagcccccaggccgctgcgcagttgtggcaacggcccaaagacctgagccgggccatcgatgcggtgatcgcccagccgacgcagttcggcaccgtggcaaacaaccggatcgccgtggtcggccactccatcggtggctggaccgccatggaaatcgccggcgcgcgtttcgacccggacctcttcgcccgcgattgcaatactcatcccaaattgggcggctgcatcggctaccagcagatcaagcccgccgcgaccccggcggcgaaggcccaactggccgcactgccggtgccggcgctggtgattgcggggggcgtgccaacggaagatatggaccccaacctggagtccgccgacatggtcaggcgcatgcccaaagcctcgacccagtacgtggaaatcctcgatgccacgcacttcagcttcatgtcgatctgcaagccgggtggcatggcgttgatcgaagaagactcgccgggcgatggcatgatttgccgcgatggcgagggggctcggccaagggcggtgattcagcaacaggtgctggatctgatcaccggttttttggggcggacagcggcacggcgcacggcggccgatttttagctggtatcatcccgggcctgtacaacccgggtagaaccacatgaaccgccagaaaaaactccagcagctcttcaaggaaaaagccaggaaggccaacgccaagttggcgccgaagaagaaggacaagtacatcagcaaggcagaccgggaaaagctcgcggccgaagccgctctggacccaagcctttccccggaaagctgactcagcaaccgctcaacgcgacctgccgccgctcgcccgcaaagaaaaatggccgcagccgcacgcccacgctgttgccgataaacgccgccaccagccacacccagccatgcaggctgcccgaggcgatgccactgaagtacgcgccgatgttgcagccgtacgccaggcgcgagccgtagccgagcagcaggccaccgatcaccgccgccaccagcgagcgcgccggaatcttcaggctgggggcgaaacgcccggccaggccggcggccagcagcgcaccgaggacgatgccgatgtccatcacgctggtgatgtcttcccacaccggcgcggccagggctttggcgttgcccggcatctgccagaacgcccaactggccacgtccacccccaggccgctggcgactttagcgccccacagcgcgaatgcagaggtgatgccccagggccgtcccgccaacgccagggtggcgtagttgagcagggccaggccgatggcgccccacaccaatggccatggcccacgcaggaagcggcgcacgccttggtgttcgcttttcacgccctcttccaactgaccatgacggcccttctccagccgtacggtcaccagcgcgatgatcgcgaacaccaccaggctcaagcccaatgccggcaccacgccgaagctcttgacgatggacaccgccgggaacgccggcagcgcaaaccaccagtcaacatggtgcgtggcgatcaacgaaccacagataaagaacagcaaggtgaccagcatgcgcgcattaccgccgcccacggtgaacagcgtgcccgatgcacaaccgccgcccagctgcatgccaatgccgaagataaatgccccgaacaccaccgacactccggccggcgccaccagcccggtcaccggctgcccgaacagcgtgcccgcccccaacgccgggaagaacagcagcaccgccagcgccagcatcaccatctgcgcgcgcaagccggcgccacgccgatcattgatgaacacgcgccaggccgaggtgaagccgaaggcggcgtggtagagggtcaagcccagtgcggcgccgaccaccagcaacagcacctggcgcgagccaacgctgttttgcaagaacagggcgcccagcaccaggatgataaaggccaccagcggcgcgacgggcttgcgcgcgggggtaagaggcagtgaggtactcatggggaatctcggtctgtttgaatggagtaggctgcgagggtggcgagtataaccttgtgtgtagataatcctgggaggcgtgtggcctgacggcgcccctttcctccatcagccggtgaccccgtggccaaagacatcgagaacccttgcgtttccctctgccagctcagcggcgacctgtgtgtcagttgcggacgcaccaaggatgacatccgcaagtggaaacgcatgaaacgcccggagaagatggccgccgtacagcgtgcgacacagcgcctcaaggctttgaagaaagccaggtgaggccgttcatgcatctgtggtgagagcgcgtctgtggtgagcgggcttgccccgcgttggagtgcgcagcgctcctttttttttggggccgctacgcagcccaacgcggggcaagcccgctcgccacaaaataagcccgctcaccacagaggcccgctcaccacaattggcccgcaagatcgcggatcaaccccgccccaccgaccccgacaccggaagatcccccagcaacttgagcccggtgctcttcacaaacgtcgcgtagtccatcggtttctggatacgcgtctcggcattgggtagcacataggcccaggcacgtttgctggaggcgtcgtacaccagcttgaacaaccgcgtcggcacccataccttgttatcgccgatggtgccgtagcccgggtcgaacagcgggcctgtgaacacatacacatcgccgccggcgcgcacggcaaacttacgcacgtcggcctcgaccttgctccagatcttgcggttgttggtggggtcctggggcaccatgttcgacagcgcgaacgactgcgccatggcattggcattcggtgcatcggcggccggggattgatgcccacggtccaccgccgggtgctgggcgcggtagtcgctcaactcggcgcgaccggctttggggatacgcggatcggcatagaactggttggtgcgttcctcgcccttggcgtctttcagcaaggcggcattcaggcgttcgaccaccaccagcggggtcttgctggtttgcgagtagagcaccgcaaaatggtcggaacacagtgccaggggtttcatcgcggccggcaccgtggcggggttgatcggtgcggcggggaacaggtcggcacagctgtcgaaggacagttgtttttcctgtttggagtagaggtccggcaggctgcgggcgttggccccacaagacagcaaaacaaaggcggtcagcccaacggcaattttgcgtaggtacatgcattaaatcttcgaaaaggagtgaagcggctggctccggcgtgcggagccaagtggatgatattgcgaggattattgactagcagatgtgagattagtgcccgaccgctgtaggttttcccgcagcccgcgcgcctggtttgaaaccatgggcatgggcgccccaggcaatcgccagcgacacgccgatcaacagcagcatcgcccacggaaacgaagccacgccccaggtctccagcagcaccccaccgaccacgccgctgccggcaatcgcgctgttccaggccaccacattcagtgacagcgccacgtcggcgccatcgcccgccgcatcggccagggcggtttgcagcagggtcgcggcgccaccgaaactcaggccccacaccgctacaccgatatagaccacttccggccggttgccgaaaaggcccagccccagcgcgacgatcgcgaacaccgccaggctgacgagtacggtcttgcgcaataacggctcaacgagcctggccgtgagccagatccccgccaacgcggccaccccgaacaccaacaacaccaggtcaacccgctctgccaaccccgcaggcgccacgaacggtgcgatgtaggtgtacagaatgttgtgcgccagcatccaactgatcaccaccgccagcaccggccgtacgcccggcgtggtcagcacctggcccagtgacacacgttgatgggcgggctggggcgcatagtccgggactttcaccagcacccacgcaatcaacaccagactcactgccgacatcaggccaaacgtggtgcgccatcccaccaacccacccagccaggtgccgagcggtacacccaatgacagcgcaatcggcgtacccaccatcgccaacgccaacgccctgccctgctgatgcggcgcgaccatgcgccgggcgtaaccagccagcaagctccaggccagaccggccgctacgccggcgaagaaacgcgctaccagggtcacgccatagtgggacgacagcgcggtgatggagttgaacagcagaaagccgacgatggtcagcaacaacacattgcgccggcgccagccacgggtcgcgatggtcatggggatcactgccagcaccgagcccaaggcatacgcggtgaccatctgcccggccatcgacggggatatcgccaggccgtcgctgatcagcggcaacaggccggcgggcagggtttcggtaacgatgcagatgaagccggtcatggccagggcgagcaaggcgccgatgggcaggcggtcggatgacgccgataaagtgagtgagggtgtcacggagaactccttgagcgagacttaaatactgatcgatacaaatgttgcggccgagcacggctcgttgtcaacgacttatgtatcgactagtatttatctcgcttccccaccggagatccgccatggcacagatgggccgcccccgcactttcgaccgcgaccacgccgtagaccaggccctgcacttgttctggcagcatggctacgacgccacctccctggcccatctcaaggctggcctgggcggcggtatctccgcgccgagtttttatgccgcgttcggttccaaagaagccttgttcgacgaatgcgtgcagcgttacctggcgacctacgcccaggtcaccgaatgcctgtgggatgaaagcctgtcaccgcgtcaggcggttgaaacggcgctgcgccgatcggcacgcatgcagtgtgaagacgggcaccccaagggctgcatggtggcactgggtgtgatgagtgcaccgagcccggagaatgcgcgggtggcgaatgggttgacgcaatcacggctgcgcacccgcgcgggaattgtggcctgtgtggagcgcgcaatacgtgccgggcaattgccaggcacgattgacccggcggtgatggcgacggtattcgacagtttcctgcaaggcgtttcgatccttgcgcgcgacaacgtgccccacgccagcattgacgcggcgatcagccaactgctgctgacctgggacattgccgcgtctacgacaccgcccattcgtcccgacactgcatcaggaaatccacaaacgcccgcacccgatgcggcatatagcgcccatggggatacagcagggtaaacggtcgtgaacgcccgccaaacggctgcaggacttccaccaggctgccgtcagccagttcctgctcgacgataaacctgtaggtctggaacaaccccgccccatgcctggccagggtcaccccgcccagcacatcatcggagcagctgtaccccgcctcccccgcatactcctgcgccttgccgtccacctggaacagccaggcgatgcgccggccattgctgggcagttcgtactggatgcattcatgggtgggcaggtcttccagcgtctgtgggatgccggcgcgtttcagataggacggtgccgcgaccaccaccaattcggcgtcttccagcaggcgcgcaatcagcgatgagtctggctgggcgcgcacacggaccgccaggtcgtagccttcggcgacgaagtcgatgttgcgattgctgatgtggatatccaccgtcacctgcgggtacaacgcacgaaacctgggcagcagcggcagcagacgatgatgggcgtaggtggtgggaatgctgatgcgcaacaggcccgatggcacggcttgcgcgcccatcacttcctgctgggcttccaccagctgggtcagggcctggcggcattgctcgaagaaagtccggccgctgtcggtgaggcggatgctgcgcgtggtgcgcacaaacagccgcgcgcccaagcgctcttccaggcgggaaatgctgcggctcacggccgccggcgtgacaccggcaacctgcgcggcggcggtgaagctgttggcctcggcggcgaggcagaatagttcgatactgcccagctgcacatcttcgaaatggcgcttcatggtcgctccctaaaacaacagccgcgagaaattgcagcacgcctgtgccagttgcgctacctcttgattcagcccgtattggcggtccacccggtgcaacgccacatactggatatccggcagcgccggctgggtcaccagcgcacgcagggtgccttgctcgatcaggtgggacaggcaggccacgggcaggtagctcacgccgatccccgacaacgccaacccggcctgcaccaacaggttgtggctggtgagggtgcgcggcatctgcacatggttggccgccagccagcgctcgtagatcatcccggtccccgactgtgaaccttgggtgagcacggtgtagctggccagagtctccaggctgatggggtcggcatccgggatcaggtcaggggcgcacatccaggcgttttccacgcattgcagcggcgtactgtgaaaacgcgggtcgctgtagacgtcaggcacgatgaccaaatccaactggtcgctttccagtttgcggaacagctcgctgctgagctccaccgacggttcgatctgcaccttggggtacatctgacgcagcgcttcgaccaacgccggcagccaagtgagtgcggtgagttcggtgacgcccaggcgaaaccggcgcaccagcacatcacgggcactgacccgttccagcaattggtcgcggctgttgagcaggtcacgcgcgtagtccagcagctcgccccccttctccgtcagccgggcgttacgtttgctgcggtcgaaaatctccacgccgaaggtgtcttccaactcctggatacgcttggagatggccgactgcgacatgttcaacttgttggccgctgcttcgaagctgcccagttcggcgatccagtacagcgcatcgatttgcttgaacgtgatcatggcaggctaatcatgagaaaaagcgatgctaacacatcataaaatatcgctaaaactctccgatcatcgctcataagatctggccatagcccgtcgctatccaacgattctggagatttgccatgtccttgcccggttcacgcatccttcccaacgcccccatggcctcggccgaactggtcgaggcgttcgcccaagtggtcaccccgcacatcagcgacaacctgggccggcacatcggcgcacgcggcctgacgcgctacaaccgcagcggcaaactggtgggcacggcgatcacggtgaagacccgtcccggcgacaacctgctgatctacaaggccctgagcctgctgcaacccggccatgtgttggtggtggacggccagggcgataccaacaatgcggtgatcggcgagttggtcaagctctacgcccagcaacgcggctgcgtggggtttgtgatcgacggcgcgatccgtgatgtcgccagcttcgacgacacgccttgctacgcccgcgctgtggtgcacaccgggccctacaagaccggccccggtgaagtgaacgtgcccgtgtccatcggcggtatgctggtcaaccccggtgacctagtggtgggtgatgaagacggcctggtcgcgttctcccaggccgacgccgccgaagtgctgcgccgcgccgcgcaacatgccgaccatgaagaggccgtcaaagcagagatcgccagcggtgccgtgcgccagagctggatcgacaaggtactggacaacgcagggctggcgtcatgaggcactggttgtctgatcgcgtcctgggcatcgcgccctcccccagcatcgccgccaacgcactggtcaccgagttgcgcgcccagggccgcgatatcgtcaacttcaccgtcggcgagccggacttcgacaccccggcgcatatccttgcagcggccagccaggcgatgcacagcggcgacacccactacacgcccaccaccggcaccctcgccctgcgccaggccatctgcctcaagctgcaacgggacaacgacctggcctacggcctggatgaagtggtggccggttgcggcggcaagcacatcatctatcacgcactggccgccacgctgaaccggggtgatgaagtcatcgtgcacacaccctattgggtgtcgtacccggacatcgcacggctcaacgatgcaacaccggtgatcatccccggtgatgaaagcctgggtttcaagctgtcgcccgacgccttggaccaggcgattaccccgcagaccaaatgggtgatcctcaacagcccgaacaaccccagcggcgcggtctacagtgaggccgagctgctggcgctggcccacgtgctgcggcgttatccacacgtgctggtcatggccgacgaaatctatgagcacttcgtctacggtgaagcccggcacgtgccgctgacgcgcctggcgcccgacctcaagtcgcgcacgctgatcgtcaacggggcctcaaaaggctacgccatgaccggctggcgcctggggtttggcgcaggtcccgcctggctgattgcagcgatcgccaagctgctgtcgcaaaccaccacctgccccagctcgttgagccaggcggctgctgtcgccgcgtttgccggagaccaggcacccatcgccgccatgcgcgaggaataccagcaacgccgcacacgcatgttggctttgctcgcggacatccccggtttgagctgtaccccaccagacggcgcgttctacgtgttcgccaatgtgagcgggctgatgggcaaagtcacaccgcaaggcggtcgcctcgacagcgacagccaactggtggactacctgctgcgtgactacggcctggccacagtcagcggtgcggcgtacggcatgtcgccctatgtacgcctgtccttcgcaagctcgctagaagtgatcgaagaaggttgccgacgtctcaaggacgcgtgccacgacctgcgctgacccgccctgctgcacccggcggccaacggacggccgctgttttgactgcctagaacaacaacttaaaaatcattgatcgcaaatgaggcattcccatgcacacgccccgtatcgcgctggtctggcaaatcatgatcggcttgctggccggcatcgccattggtgccctgttgcaccgctttcccgaatcccggccgtggctggtggacaatctcctgcaaccggcgggcgatatttttatcaagctgatgaaaatgatcgtggtgcccatcgtgtttgcctgcatggtggtgggcattgccgggcacggcgacggtaaatccctgggccgtatcggggtacgttccctaggctatttcttttgcatcactaccctggcaatcatcgtcgggctggtgctgggcaatctgctcaagccgggcgccggtacggagttgtcgagcctgcacgcggcaaacatcaccctgcccaccagcaacggcggtgggcatagcctggggcagatcgtcgtcggcatcatcccggataatgtgatcagcgccatggcccagggcagcttgttgtcggtgctgtttttcgcggtgatgttcggcctgggcgtcgcgcgcttgcccgccgagcgcaaggacccggtggtcgcactgctgcgcggcgtgtctgacgcgatgttcaaggtcacgtcgatgatcatggcctactcgcccatcggcgtgttcggcatgatcgccgtgaccgtggccaacttcggttttggttcgctgttgccgttggcgaagctgatcatggtcagttacgtgtccatcgcgttctttgtactggtggtgctcaacctggtggcgcggctgtgcgggatcaatctgtttgccttgatgcggcatatcaaggatgagctgatattggcgttctccaccgcgagttcggcgtcggtcatgccgcaattgatgaagaagctggagacctacggggtgccgccgtcgctggtgagctttgtggtgccggtgggctactcgttcaacctcgacggcgcctcgctgttccttggcatcggcacgctcttcgtggcgcagttgtatggcatcgatttgaacctgggggatcaggcgctgctggtggtgaccatggtgctcacgtccaagggcgccgcaggcgtgccggggttcatgttcgtgattctctcggcaacgctcgccagtgccgggttgccattggaggggattgcgtttattgccggggtgtatcgcttgatggaaatgccgaccaccgcactgaacgtgctgggcaacgcgctggcgccgttggtgattgcgaagtgggagggccgggaggtgccaggggctcaccaaagagcacctacgcggtaagtttcctgatgatgtgtaggacttgcctgattccgccggctcggctggaacctgccgctttttttcgctagattcctccccaacgcatatgggcaaccatgtgcccaccttccgaggcccgttgcgagaaatcgcacgggctttcgtgtttctcatggatggggaaatcgaatttggtgcagtacattgcttatctggatgagtttgggcacgtgggccaatatgtctcgcgaaaacacccgatgtacaagaccagccctgtattcgggttaggcggcatgctgattcccgccgaagaggtgcgcgagttcgcaatctatttctacaagctcaaatgccagttactcgcctgggacctgaaacacaaaaaccctcatcacttgcctgcctatcaatgggaaaagaaaggctctgcactttttactgtgggtaatgtgcgcaaatatccggagctgcgaagatcctcatgtcgtttgctgagtcatatccagaaaactggcggacacgttttctacacgggtgagcacaaatctatcgagcccagggaacacgactcgaccgagaccttcaagcggacgctgttacagtcaatccgcaagattgatcgcttctgtacgttgaacaatgcctcgttcatcgttctgctggatgagcagaaagcaggcaatgaatggcgcgaacgaaacgtagaagcctgtaccctggcgatgtttgaagatccagcagaaaaatgccgcacactgatagagcctccgcttcaaggtgagagctatctgtttcaaacgttgcaatgtgctgactggctgtgcggattgattggtcggctgacgacgtttgctgtcgctcctgaggagttcgaagactggcaacttttcgatatgtattttgcggcacgcatggctgacgtgaccctgccgagcagtggtctggacggtaaaaaaacggccaaagccaaagagcaattcgctcaattaacagcaaatgactgttaatcattgggccaaataaaggcgctcctgagagcgcctttattcagttcaactcactgctcgccgatggatttcacatccgccttggcagcgccaccaatcgcaatgcgttttggcttggcttcctccggtaccaccctgagcaggtcgatgctcagcaggccattggcaagctgcgcgccctgcacttcgatgtggtcgaccaggcggaacgacaagcggaacgcgcgctgggcgatgccctggtgcaggtaggtgatgccctcatcgtgttcgcgcttgccgccggcgacggtcaacacgcctttttccacctggatttccaggtcatcctccaccaggcctgcggccgcaatcacgatccgataatgatcgtcaccgtgcttttcgacgttgtgcggtgggtaggtggtgccggcctcgctgcgaagcgccgattcgaaaaggtcgttgaaacggtcaaagccgacggagtgacggaacagtggggccaacgaaagagtagtagccattgcaaaatctcctgaggtttctccaagtgatttgatacgcgacccgcattcggcatcgcgtaaaacctaagtaggttcgggctgaaaattttcaagcggccccacaaaatttttttatccgatgtgacgagctccggacgaaaggctgacacaccggcgcgccaggaccgtcgtggggtcaaccagggcgacccggtgggcaccgatctcgaacacctcacaatgcgccagcaccaacggtaactcggtacacccgagaatcaacaccttcgccccctgctcacacaaatgctccgccgccagcagcaactgctcgcggcacacgccctcggtaaaccccgccttgatcccccgttcgccgtagatcgcctccatcaccagcgcctggtaatcaaagcccggcgtgatgagttgcaagccgcagcgccgcgcggcctggtggtagacctggctttgcagggtgccggacgtcgccagcaagcccacggcctggccgctgccgtgggtgtgcacgatccactccaccgtctcgctgagcatgttgacgatgggcacgcgcaggtgcgcctggatgcgttcgacaaacgcatgggcggtgttgcacggaatcgcgatggcctgggcgccggcgctttccaggcgtttgcaggtggcgtacagggccagggtcgggtcggtttcatcacgcagcaggttggcggtgcggtcgggaatctgcgggttttgctccaccaccatcttgatatggtcctggtccttgtcggccggggtatgggcgaccaccttgcccatgaaatccacggtggccgccgggccgacgccgccgacgatgcccagtttgaacggcggctgacgcgccgggccatcggcctgggtggcgaactcggcgtagatctggttgatgtcgagggcgctgatgccgcgccgttgcaggtcgccgcagaccagcgacaactcggtcatgcccggcacaatcaccgtggcgccctgcccttgcagcgacaggcacgcctggtacaccgactccagcggcacgccatcgaggtggccatccttgatgccgttgacgccgtacatcgcctccatcaaggcggcctgggcgtggttctccgggtagaccaggatgaagtgctggccgaggtgccgttcaaacaagccgccgtggcgcacgaagtccgatgcgatcacgcccaggatggtgccgggcgcgacgtggcgggtgatgtgccggaccagcgcctgcatcatgtccagcaccggaatgcccagttcctgctggatttcagcgcgaaaggtctggctggcgaaacacggtagcagcaccgcatccaccccggtgttttcaaaggtcttgcacacctggaacacatagaacttgcgcgcggtcatgctcgcgttacggtccaggggcagcaacacatccttgaacggatgctgctcaaacaggaagtgatagcggccctggtcctccagcacggcacgggacttgaccagcttgtagaacagatcgccgcccgccagcgaaccgagcccgccgacgatgcccagccgggaggtggggttcatgcgtgcgcaccctgcggcagttcagcggggtcttccgcgctttcggatttggctaccaccgccgtggcgatgctgttgcccaccacgttggtggcggtgcgcgccatgtcgaggaactggtcgataccgatgattagcaacagacccgcctcgggcagattgaacatcggcaaggtcgccgccaccaccacgaccgacgcccgtgccacccctgccatgcccttgctggtgatcatcagcgtcagcaaaatcagcagttgctgggtgaaactgaggtcgatgttgtaggcctgggcgatgaacatgatggcgaacgcctggtacatcatcgagccgtcgaggttgaaggaatagcccagcggcagcacaaaactggagatccgcttgggcgcgccgaacttctccagcgcctccatggttttggggtaggccgactcgctgctggccgtggaaaacgccagcaggatcggctcgcggatcagcttgccgagggtgaacaccgagcggccgagaaacagatagccggcggcgaacaacaacacccagagcaaggcgatccccaggtagaactcggcaatcagcttggcataatcggccagcaggcccaggccattggtggtgatcgccgaagcaatcgcggcgaatactccgagcggcgcgaaggccatcacgtagtcggtgatcttgaacatcaccttggccaactcgtccacggtgtcggtgatgcgcgtgtaaccggcacgcctgaccccggcgagggcgaagccgaagaacagcgaaaacaccacgatctgcaggatctcgttgttggccattgcctcggcaatgctgcgcgggaatacatggctgatgaaggtcttgaggctgaagtcgccggtgttgaccggcaccgctgccgtcgcatgttgcaccacctgcatgttcagcccggcgcccggttggaacaggttgaccaaggccatgccaagcatcagcgagaccagcgacgccgtgacgaaccacagcatcgcacgcaagccgatgcgccctaccgagcgcgaactgcccatgctcgcgatgccgcccaccagggtggcgaacaccagcggcgcaatgatcatcttgatcatgcgcaggaaaatatcggtgaccagcgaaaagtatccggccagctccttggcggcctgctcgctccctgcatagtggtgacacgcccaacccaccagcacgcccaaggcgatgccgactgcaattcgacgggggagtttgttcttcttcacaggtgcggccctcagatggcttttgttgtatggagcggattctagggacgcaccccggcggccatgatgagtaatccggctaaccccatgcgcttttggaatagtttgcaaaaagcccagccccggctacgcgcggcgacatacactcagggctcatcgcctggagaaccggcatgcagatcaaatggttggacgacctcttggccatcgccgagtggaagaacttctcccgcgccgccgaagtgcgttgcgtgacgcaatcggcgttgtcgcggcgtattcgctcactggaggaatgggtgggcgtcgaactggtcgaccgtggcacctacccggtgcaactgaccgccgcaggcgccgccttctgcagcgaaagccgcgacgccctcgccggcctgatgcgcctgcgcgccagcctgcgcgaagtggaacgcatgccggggcgctcgatccaggtgaccgccgcgcacagcctgtcgatgaccttcctgcccaagtggctgacgcagttccagcgccagaccgagcagttcaatgcacgggtggtggcggcgaatattcatgacgcagtgattgcgctggaagaaggcagttgcgacctgatgatcgtctaccaccatcccctggcgccgatcctgctggacgcgcaacgcttcggcagcctggccttggggcatgatgcgtttatcccgttgtgcgcaccagacaaacgcggccgaccgctgtatcgcctgccggggagcacggggaagcctgtgccgcatctggcttacaccgccaccacgttcctgggccgcgtcgcagaaatcgtgatcaagaacggccctgcgcccgccgtgctggagcgctgctacgaagccgacatggccatgcttttgatgcgcatggccattgaagggtatggggtggcgtggttgccgcagagcgcggtggtggatgagttggagcgtgggctgctggtgcgtgcgggtggcgaggaatggagtacgcggttggagattcgctcgtactgcgcgattgaaaaccagaacccgacgatgaggaagttgtggcgcacgctcgaagggttgcgctgacgttaatgcacctgcggcatcgcccttcgcaaacgctgggccagtaaatcggagaacgcttgcgccagggccgtacgggggacatcactgcgaaaaaccaggccgaatgagtacggcaaaaccggtagaaaaggccgcgtcacgatcggcaagtccaagaaatcattggccagcaattcattgatgatcgacacgccgatgccctcggcgacgaacgcgcaggcggcacctgccgaatgcacttccatacgcacgttgggaagaatggacgcctgccgaaacacctggtcaagctccgtgcgcaggttgcgctggcggcccagcagcaccaacggcacaccgcgcaaatcactcacctggataacgcgccttgcgcacagcgcgtgcgcttggggaagcacgcacacgccttgcacctgcaacaccggcaccacgtcgaagcccggcaattcggtgggcagacgcacaaaggcaaaatcgacgctgcggtccagcaccgcacgctcaagcgcatcgtaggagccagtgaccagttcgatcacaaggtcatcgcggccctgcatgaattcggccaccacacggggcaaccattggtgggtcatgctggtgggcaccgccacgcgcagcagcgcccggcctgcgtgacccaggcgcagatcgtcggccatgcgctggacgcgttgcatgttgtcgaccagccccgacacctccggcaaaaacgcctcggcctcggaggtcggcgtcagcctgcccttcctgcgcaggaacaaggcaaagcccagtgactcctcgagctggctgagcaaacggctgatggccgactgggacaagcccatgcgcgtggcggcatcgatggtcgaaccggtcgacatgatggcctggaaagcttgcagttgtttgagattcacgctcgggctccaagcagacacgactgggcgcagtttccgctggcgacacctgcggcgtccagccttacagccctaccagagcttgatgtcgtaggtcaggtacaggcggttgtagtcccaactggtgagcacattggagcggtacgccgtgttgcgaaattctgcccccaagcctttgaacgtgccgtcctggatcacgtacttgaggctggtatccagctcgtgctcatcggccggtttgccggaatacttggcgtcgaaacctttgtagtagcggaccatgaaactcaagcccgggatcgccagggcggaaaagtcatagtcgtagcgcagcatccaggttttctcatcctccaggatgaatttgctcacccccggactggtaaaggacgtggtggccgcaccattcaaatacggcaatgcggcgtcaccggacaactgctgatagccaccgccgaacgtgtgcccgccgagtcgataactcaaggagccgctgaacatgtcggcgtccgcagcaccgttataggccgcccccgtttcaagactgttgtaataacgtacgtccgtcgtcaagtgacccggcccgacagctactttatgcacaaccccgaaaaagtgctggcgatagaagttttcaagttcaccgtagtaataagacagactgatggttttattcagtgcatacgtaccacccgcaaaataaaaatcaccgtgcttcgggcctttgtaaccgctcggtatcagatcgacgttatcgctggagttacgcaactttgattgatccagtcgcccaccttgcacaaatagatgttcgataccggtgtattcaaactgcgtgccttggaacgtctgtggcagcaaacgcccatcgttgtaactgaccaccgggttcttgggcaacaacgtgcccgtcttcaccacgacatcggcgaaacgcagcttgccggtcacgccgaggctggaaaaatcacgcgcggcgcggccatcatcctgcactggcaacaggcctgtaccggcgtgtgcagggctggagtcaagcctcagccccagcaggcccagggtgtcgaggccaaacccgacggtcccgggggtgaatccggaacgcatcgtcagcaacaacccctgtgcccattcgacacggtcgttgccgccgctgcggttgtcatgattgaaagcgtaattacgcaacgcaaggtggccggtggaatcctcgaggaaaccttcggcgcgcacgcttgatataccaggcaccattaagctggcgcacaaaagcccgccggtcgttataaacgcacgcatattaaagccctcagctgtgtttttttttgtggcagagagtaagaaaagttgcttgaccaagtatttcctggccgatgctcctgagtgttaatgaccgaaacgagtaaacaacgctatcgaattaaaacaggggcgacaagcttatgacaaacgcgcatcaggctatgacaaataacccgacgacaccttgaaacgcatagcccaatacgcgttcgtcataacattgtgaggtatttatgattgccctactgtgccgttgtagccgttggctatccccataaaaaaaagatgagagcaccgctatgtcatccactgcgccaacagtcaccgacaccgcgccacccaaaaacacccgccaactcaacccggcaatcatcttgctgagcattgtgttcctggccatggtgctgacttatgtggtgcgctccggccagtttgaacgccaagacgtccgtgtgattcccgggacctatcaggtactggaaaaagacacctcgctcagccaactcttcgccctgccgccgcgctcggcgaataaaaccgtggcacaaccggtatcgctggccgagacctttctggccattcccctggccatcgagaaacgcgccgggctgattttcatggtgctgttcatcggtggcatgtttgccgtgctgaacaagaccggcaccatcgatgccggcctggaccggctgctcggcgccaccaaaggcaatgtctacatcctggtgccaaccctgatgctcgcattgtcggcaggcagcaccttcatggggctggcgaaggaatacatcatgttcgtgccggtgatggtggccatggcaaaccgcctgggcctgcccaacatcgttggcttggcgatcgtcgcgctggcggtcaagacggggtacatgggctcgatttccaaccccatcgcgctgtctgtcgcacaacccctggtcgggctgccggtgttcagcgggctgagcatgcgcatcgtcgcgtacttcatttttgtcacgctggccgtcggctacatcctgttctacatccgccggagcggcttcgatacctcggccacgttttcccattcgggcaaaaaactctccgcgcggcataccctgagcctgatcacactgggggtgggcgtcggcttcctggtgtacgcctccaacacctggcactggaagtaccccgagctgtcctcgtattacctggcgctgaccatcgtcttcgccgccatcgcaggcatgagcccgagcaccacggcaagcacctttgtcgaaggcatgaacaagatgctcatggccggcgtgctgattgcactggccacggccgtggagtcgatcctcgccagcggccaggtgctggacaccatcgtgcacgggctgtcgcagatcatcggccagcacggccaactgcctgcggcgttcggtatgttcttcgcgcagatgagcctggatgtggtgattccgtccaccagcgggcaggctgcggtgacgatgccgatcttcggtccactgggccaactggccggcgtgagcccgcagaccacggtgtatgccttcttgctgggcaacggcttgaccaacatgatcacgcccacttccagcggcctgctggtactgcttgctgctgccaatgtgggctgggtgcagtgggcgcggtttgtgctgccgctgttcctgatctgcacggcggtggcgttgctcctgctcgcctgcgccgccctcaccggctattgaattcgactgaccaaggctttgtcatgaccctccctgcattcgaaaacatgcacatcgtacgcaaccagatgatcaccctgcgcgatggcgtgcgcctggccactgacatttatctaccgctgggcaccggcccctggccggttgtcatcgagcgcacgccctacgacaaatccggcccctcgcgctcggaaaaacgcctggacgggctgcaccttacccgcgagcagatggccgcagcctttaccgagcagggctttgtggcgatcttccaggattgtcgcgggcgttaccgttctgaaggtgtgttcaccaaatacatcaatgaaggcgaagacggctacgacaccttgcgctggatcgtcgaacagccctggtgcaacggccatatcggcagcatgggcttgtcctatgcagcgcacacgcagatggcgatggcctgctgcaatgcgccgggtctcaagaccatggtgctggactcgggggggttcgccaacgcctaccagtgcggcattcgccagggcggcgccttcgaactcaagcaagcgacctgggcctacaagcaagcccaacaaagcgccgccgtgcaggccgacccgcagttgcgagaggcgttggcccaggaagacattctcgattggtttgcacgcatgccgtggcgcccagggcattcgccattgcgccatgtaccggagtatgaaaactacctgttcgagcagtggtcccacggggacttcgatcagtactggaagcaactgggtatctacgccgaaggtttctacgagcagatcccggacatcccggtgttgttcatgtccagttggtacgacgcctatgtcagttgcacgctggacaacttcacggcgttcaccgcacgcaagcagtcacctcaacgcctgatcatgggcccgtggctgcacggtgaccgcaacatcagctacagcggcaacgccgaatttggcaacgccgcgcctttcgacggcaacctgggcgaagactggttgagttgccgagtggaatggatgcaacgctggctcaaaccaaccgaagccgaacggcgcgccactcatcaggtcgatgtgttcctgatgggcggcggcagcggccgaaaaaatgcgcagggtcggctggagcatggcgggcgctggctcaagtcgccgtgttggccactcgcgggcagccaacagctgaacctttacctgacagcacaaagagccctttcgccgcttgctcctgtgggggtgcccagttcattgagttacttcagcgatcccgcccacccggtaccgaccattggcggctcgttgacatcgggcgctccggtgtttgtgggcggcgctttcaaccaggtcgaaagcccggactttttcggcactcggggtgaccactcggcactgtgcgaccgagatgacgtagtgagcttcgaaacccaaccgcttgagcacgactgggtggttgccggcccggtgaaagtcgaactgtgggtgcacagcagcgcgctggataccgatttcaccgccaagttggtggacgtctatccgccgagcgacgattacccacaggggtacgccatgaacatcaccgacgggattttccggtgtcgctaccgggactcgtgggaacacccggctccgctcacgccgggagagccgttcaaggtggtgatcgaacccttcgccacctgcaacctgttcaagcgtggccaccgcctgcgcctggatatcgccagcagcaactttccgcgcttcgatgtaaaccccaacagtggcgaggccgaaggcatgggcgagcatccgcaggtggcgcgcaataccgtgcatatcggcgccgggcatccgagccgtttgatactcacggtcgtggacaacgcgctctcggaggcggaccaaaactgatgcgcgaggcgatttactgccgaaatcgcattgacatatcggtaaatctcgatatcctcgcgccatggacctactcgacatattcaaagccctctcgaaccgtactcgactcgacatcctgaaaggtttgaaggaccccgaaaagaacttccccccgcaggatgaaggggacgttcataccgtgggcgtctgcgtgagcagtatccaggaaggcgtcgggctgtcgcagtcgaccgtgtcggactacctggcaacgctgcatcgagcgggcttgatcgaaacccgccgcatcgggcagtggacctattacaagcgaaacgaagcaaccatcagcgcccttgccgagatcatcggcaaggagctgtaattttttgccccagaatatcgagaattcccgatatccctttttaccgaaacctacggctattgaaacctaccgctattgaaacccacgactactgaaacgaggtaatgcaatgaaagcgatgatgcttaaatcatttggcggcccggattcgttcgaacgctgcgaggtgcccaagccggtaccgcacacgggacaggtgctggtgcgggttcacgcaacctccatcaacccgctggattaccaggtgcgacgtggtgactatgccgagctggtgcccctccccgccatcaccggtcatgacgtgtccggcgtcgtcgaggccgtaggcccgggcgtgacgaacttcgcgccaggcgacgaagtctggtacaccccgcagatattcgacggccccggtagttatgccgaataccacgtggcggccgaaagcatcatcggtaagaaaccacctacgctcagtcacctcgaggcggcaagcctgagcctggtgggcggtaccgcatgggaagcgctgaccgtgcgtgcagcacttcgggtgggggaaaacatcctgatacatggcggcgcgggcggcgtcgggcatgtggcaatccaactggccaaagccatcggcgccaaggtgttcaccaccgtgcgtgaagccaatatcgagttcgcacagcgcatgggcgccgatgcgatcatcgactacgaaaaggaagattacgttgacgcgatcctgcgggaaacgggcgggcgcggcgtcgatgtggtgttcgataccatcggcggccacacgctttcacgcagccccgacgcactcgcgcaactgggccgcgtggtctcgatcgtggacatagcgcaaccgcagaacctggtacaggcctggggcaagaacgcgagctatcactttgtgttcacacggcagaatcgcggcaagctggatgagttgagtacgttggttgcgcagggccaactgcggccgcatgtaggggcggtttatgcgctggccgacatcggacttgcccatgctcggttggagggtgctcacaacggaattcaaggaaaaatcgcgattgccgtcgtgcccgctcaggaaacaagaccatgatttacgagatcgccgtgctgccggttcacaaggaacacatcgacgcgttcaggcgtgcctttgccgaggtggcgccgttgctgagtcgtgccaaaggccacttgggtcatatgcttgcgcagggggttgaaacaccggagcgattcaacctgattgtgcgttggaaatcgctggaagaccatacgccggggtttgaagcgagtgaagaccatcgggtgttcatgttgggactggaaaaatacttttcggaggaaccgcaggtttatcacattgagggggcggtttttagcgcctagagaaatccaaggcaaaaaaaagcctgcatcgctgcaggcttctctttatgtcgctatctggctccacgacctggactcgaaccagggacccaatgattaacagtcatttgctctaccaactgagctatcgcggaatgcgccgtatgttactgattgaaaaggagaagtcaagctttctctggcattcggcgtgattaaaccggatggccggttgaaaccctgtgctccctggccagttccagccaggccagggcggcgggtggcaggtgggcgctggcgcgccaggccagggcgatgtgccagtcggtgtggggttcgtccagggggatcagggcgatgccggggtgttggtgtttgtgcgccagcatgcgcggtacgaaggctacgcccaggccggcggcgaccaggtcgatgatgaagtcgatctgcccgctgcgagcggtcaccttcgggttgacgcctttgcgctcgcaggcagcgaggatcttggcgttgagggcaaagccggcttcgaacaggatgaacggcgaatcggccaggtcggtaaagtcgatacgttcaaggtcggccagcggatggctgatgggcagcacggccatcaacggttcgttgcgcaccggctggtagtcgaagtcttcgtccaccggcagcagcagcgctgccaggtcgacctcccccgcttccaggcactcgcgcagttttttgctgccgtattcggtgagttcgatgtcgatgtccgggtagcggctgcggtaggtggcgaacatggtcgcgaacagcacgccgcaacccaccggcggcaggccgatacgcagtacgccgcgcttgaggccacacaggtcgttgatctcggccaccaggtcattgcgctcggcgagcagcaccagggcgcgacggtaggcgatttcgccggcggcggtgagctcattgcggtggccgaggcgattgagcagcggcgtacccagttcgtcttccagggtcttgaccgccttgctcacgctggattgggtcagggacaccacctcggcagcctgggaaaaaccaccctggcgcaccacttcgacaaaggcacgcaatgttctcaggttcatcagtattcctttggcgactggctgccagcgataaaagttgtttttatcatgccagagaattgcctatcctgacgccaccttgcccgtggagcctctaataatgatcatctcgtccgcctccgactaccgcgcagccgccaagcgcaagctgccgcgtttcctgttcgactacatcgacggcggcgcctacgccgaacacacgatgcgcgcgaacagttcggacctggccgagatcagcctgcgccagcgcatcctgcgcaatgtcgacaacctgagcctgaagaccagcgtgttcggccaggaactggacatgccagtcatcctcagcccggtcggcctgaccggcatgtacgcgcggcgcggtgaagtgcaggcggccaaggcggcggcgaacaagggcatcccgttctgcctgtcgacggtgtcggtgtgcccgatcgaagaagtggcgtcgcaaagcgcgcaggcgatctggttccagttgtatgtgctcaaggaccgcggcttcatgcgcaacgcgctggagcgcgcgcaagcagccggtgtgacgacgctggtgtttaccgtggacatgcccacgcctggcgcacggtatcgcgatgcccactcgggcatgtccggcccgttcgccgcacagcgacgcatgctgcaagccgtcaccaagccgcaatgggccttcgatgtggggttgatgggccgtccccatgacctgggcaatatctccaggtacctgggcaaacccacccacctggaagactacatcggctggctggcgaacaatttcgatgcatccatcagttggaaagacctggagtggatccgcgaattctggaaaggcccgatgatcatcaaaggcatcctcgacccccaggacgccaaggacgcggtgagtttcggcgctgatggcatcgtggtctccaaccacggcggtcgccaactggatggcgtgctgtccactgccaaggccctgccgccaattgccgatgcggtgggcgatgagctcaccgtattggtcgactccggcatccgctccgggctggacgtggtgcgcatgctcgccctgggcgccaaggcctgcctgctcggccgcgccaccgcctacgcgctggccgccgatggccagcacggcgtggaaaacctgctggacatcttcgccaaggaaatgcgcgtagccatgaccctcaccggcgtcacgtccatcgcgcagatcgaccgctcgaccctggtctaaccctgctgttcgacaatcccgcgcgccttgagttgggccagttgctccggtgacaagcccaagcgctggccgaggatgtcgtcggtatgctgccccagcctcggcgccggccggtgatactccacgggggtgccggacagtttgatcgggctgccgaccatggcgaaatccgggttctgcggatgggggatcttcaccatcaggttgcgcgcgatcacctggggttcttccagggattgcgcgatggagttgatcgcccccaccggcaccttcgaggcatggatacatgccacccactcatcggcactgcgccccagaaagtgcgccgagagcagcgcgacaatctcttcgcgatgggccactcggtcagcgttacgacggaagcgcgggtcgtccggcagatgcgccaggccgatgctctggcacagcgcgacaaactggctgtcgttgccgcaggcgatgatgaagtcacggtcggcggcacggaacacctggtaaggcacgatattggcgtgggcattgccatagcgctgcggcaccttgcccgaggccaggtagttcatgctttggttggccaaggtcgcgacctgcacatccagcaacgccatatcaatgtattggcccacgccggtgcgctcacggctgagcaatgcggcctggatcgccacggtggaatacaggccggtcatcaggtcggagaacgccacgccgactttttgcgggccgccgccgggcaggtcatcgcgctcgccggtgatgctcatcaggccgccgatgccctggatgatgaagtcgtaacccggctcctcggcactcgggccggtctggccgaaaccggtgatggagcaatacaccaggcgcgggttgagctcggccagggtcgcgtagtccaggccgtagcgggccagggagccggctttatagttctcgatcaacacatcggaactcgccgccaatgcgcgtaccaactcctggccttcgggagtggcgatgtcgatggccacggacagtttgccgcggttggtcgactgataatacgaagcctcgccagacgactcgccggtgtcggttttcatccacggcgggccccagccacgggtgtcgtcgccgcttttcgggcgttcgatcttgatcacttccgcgccgaggtcagccaacacttgcccacaccaggggccggccaacacacggctcagatccagcacccgcaaacctgtcaatgcacccattgttcttatcctgtgaggttgggaaatcagccgaggctcggctcttcatggcgcagggaaacccccagcagtgcccgccgccgcagccacgggctggggcgatagcgcgggtcgttggtgagttcgctcatgcgctgcaaaatcgtgagcaggcgccgtggcccgagggcatcgccccaggccagcgggccgtgggggtagcccaggccgagctgcacggcctggtcgatatcctcgacgctggcgatgcgctgctgggcaatgtcgcaggcgaggttgaccaccatcgccaaggtgcgctgggccacaaagccgacgctgtcgccgatcaccgtgacgcccacgccatccgctgcgagcaaggcgtgagcggcatcgcgcatcgccggggccgtcagcgggttttgcatcagcgtgcggtggcgtgacaggtccgtcagcacatcgatgcacagcgtgcgcgccgggtcggtatcgaagcgcacgcaggcgctgctggcatcgcggccgtaaggcgccaataggcacaacgcctgcggcgacggttgcgcagcgtgttccagatgggcgcccaggtcgatcaccagggcactcaagcgctcgtagtcttggctgttttccgtggcgatccacaccgggggcagcgcttgcaccgtgggcaccgcctgggggtgcggggcgttgatgagttggccgttttcatactgatagaagccgtggccggtcttgcgtcccaggcgaccgcctaccagcatctgccgggtcaggggcgacggtttgtagcgtggctcctgatagaactggttgtagatcgactccatcaccgggtgcgacacgtccagcccggtgaggtccagcagctccagcggccccatgcgaaaccccgcgccgtcgcgcaggatgcggtcgatatcgccgcgctcggcgatgccttcctccagcatcttcagggcttcggtgccgtaggcccggcccgcgtggttgacgataaaaccgggagtgtccttggcgcgcacgccgcgatggccggtgcgcgccaccagcgccagcaaggcttcaccgaccttgggcgcggtggccaggccatcgatcacctccaccacgcgcatcaacggcaccgggttgaagaagtgcaggccggccacgcgctcggggtgccggcaaccggtggcgatggccgtgacggagagtgacgaggtgttggtcgccaggatgcaacgcgggctgacaatgccttcaagctgttgcaacaggccgcgcttggcgtcgaggttttccacgatggcttccaccaccaggtcgcaatcgcgcaggtcgtcgatgcgctcgaccacctgcaagttggccaacgccgcgtccatcgtcgcctgactgatcttgcccttgcccaccagtttggcaaacgtggtaccgagggtgtcacgggccgtttgcgctgcgccgtcgcgagaatcgaacaggcgcaccaccacaccggcctgggcggcgatttgcgcaatgcccgcccccatcacaccggtgcccaccaggcccagcgtattgataatgtcggtcatgcttattccccccggtattgcggcgtgcgcttttcgaagaacgccgcagcgccctccttctggtccttggagtcgaacaacaattggaacgccttgcgctccagcaccagggcgctttccagcggcaggtcggcaccggccagcatcacctccttgatctgctccaccgccaacggcggcagcgcggcgatctgcgcggccagttccagggcgcggggcagtgtctggtcgtcgctgaccatctcgctgagcatgcccatggccaaggcttccttcgcgctgaccatgcagccggtgagcgcaatgcgcatcgcctggaatttacccaccgcacgcaccagccgctgggtaccgcccgcgcccggcatcaaacccaacttgacctccggctgggcaaaccgcgccgactcgcccgccacaatcaggtcgcaatgcatcgccaactcacagccgccgcccaaggcaaaaccgttgacggccgcaatcaccggcttggggcagcggctgatggcttcccacaagtattcggtgtggcggcggtacatatcgatcgcgccggcagcggcgaactccttgatatccgcacctgcgacgaagaactgttcgcccccggtcagcacaatggcgcgcacatcctggcggcgagccagtgcacggaaatgctcggcgagcgcttcacgtacctgggcattcagggcgttcttgacgtcgggacgatggatacgcaccacggccacgccattgtcctggacgtcgagggtcaccacgggtgggttagcgttggtcacattcactcctgctgcactgttcttgttagttggattacgctagtttcgctgtgcgaaataacattccgcatttgtcgataatcataagtatcgaccccgcaggtgtaaacgtaaaaacccgatctcattctaaaacagtgactaactcgctgttttactaggctttatcgcattaaaaaatcacaacccaaaaagttgcttagtttcgctgtgcggaatactattttgttttgttgattttataaaaaaatgaggcttaacatgcgccgtcgaaacccggactcggacaacaacgaagtcccagcaggcaacaacgctttcgagcatttgttgattgacccgatgcacaacgaggaggaggaagacaaggaccgccagttcgtcaccgccctggcccgcggcctggaactgctgcgctgtttcacgccgagcgagagtgtgctgggcaaccaggaactggcgcgcaagaccgggttgccgaaaccgacgatcacccgcatgacccacaccctgacccgcctgggttacctcaggcacttgccccagtcgggccggtaccagttggacgtgggcgtgatggccttcggttacgccatgttgtcgaacctgtcgatccgcgccgtggcccacccgttgatggagaccatggccaagtacgcccaggcggccgtcgcgatggccacccgcgaccgcctcgacgcagtgtacctggacgtggtccagggtgaagccaacatgaccatgcgccgccaggtcggcacacggttgccgttgcacttgagttcagcaggccgcgcctgcctggcagcgatgccggaaaacgagcgggagttcattctcgaccacatccgccagcgtcatctggaggactggccgaacatccgcaaggggctggaacgcgccttccgggactacaccgatttcggctattgcatgtcgatcggtgagtggcaccgcgatgtcaatgccatcgccgtaccgctgcgacacgcacaacacggcttgctggcgttcaactgtggcggaccgagtttccacctctcccgggagaaactcgaagacgacatcggcccccgcctcaagcacatggtgaacaatatcgaggccgccacccgttagctggaccggtgcatggcctcggcagattgacgataacaggcccgccgaacgggccgctgagggcggcacatgatccgagacgcacaaaccctgcatatcctggtggacgccattgcgcagttcgtcgatgacgcgctgatcccacgggaaaacgaagtcgccgagaccgatgaaatcccggccgacatcatcagccaattccaggacatgggcctgttcggcctgaccatccccgaagcctacggcggccttggcctgaccatggaagaagaggtgaccatcgcctttgaactggggcgcacctccccggccttccgttcgtacttcggcaccaacaatggcatcggctccatcggcatcctgctcgacggcaccgaggcgcagaaggagcactacctgccgttgctggccagcggcgcactgcttagttcgttctgcctcaccgaacccgactccggctccgacgctgcctcgctgaaaaccaccgccgtgcgcgatggcgaccactacgtgatcaacggcaccaagcgctttatcaccaacgcaccccacgccggaattttcacggtgatggcgcgcaccgacccggcgattcgcggctcgggcggtatcagcgcgtttatcatcgaacgtgacacaccaggcctgtccctgggcaagcgcgatcacaagatgggccagcaaggcgcgcacaccagcgacgtgatcttcgacaacgtgcgtgtgccggccagccagttgatcggtggcgtggaaggcgtgggtttcaagaccgccatgaaggtcctcgacaaaggccgcctgcacatcgccgctgtcagcgtcggcgccgccgagcgcatgctgggcgacgcgctgaactacgcgatcgaacgcaagcaattcggccagccgattgccgagttccaactgatccaggccatgctcgccgacagcaaggccgaaatctatgcggcgcgctgcatggtgctcgacgccgcgcgcaagcgtgacgaaggccaggacattggcaccgaagcctcctgctcgaagatgttcgccaccgagatgtgcggccgcgtggctgaccgctgcgtgcagatccatggcggcgccggctatatcagcgagtacgccattgaacgtttctaccgggatgtgcgcctgttccgcctctacgaaggcactacgcagatccagcaactggtgattgcccgcaacatgattcgcgcggcgcaacgctaagcaccacccatacccaatgccctaacaactacaacaaggtatcgctatggaagtcgccgcatcggcgggcgcgttgtcgcctgcaaaaagcaaactgtggatcattgtctttatcttctgcttcctcggcctgttgatcgatggcgcagacctgatgctgctgtcctacagcctcagcagcctgaaggccgagttcggcctgaccagcgtcgaggccggcagcctgggcagtttcaccctggccggcatggccatcggtggcatctacgggggctgggcctgtgaccgcttcggccgggtcaaaaccgtggtgtggagcatcgtgctgttctccgtgggcacggcgatcctgggcatgacccacagctattggcagttcgcgagcacgcggttcttcgcctccctcggcctgggcgcgctgtacgtggcgtgcaacacgttgatggccgaatacgtgccgacccgctatcgcaccaccgtgctcggcacccttcaggccggctggtcggtgggttacatcgtcgccacgctgctggccggttggatcctgcctgaacacggctggcgctggttgttctacgtggcgatcatcccggtgatcctcgccgtgttgatgcaacgcctggtgcccgagcctcaagcctggctgaccgcacgggccgagcgcgcgcaggagaaagccaatggcacccggcacgccctgcagagcaagcccgacggcatgttcaagctgatcttcagcgaccccaaagccagccgcatgttcctgctctgggccctgaccgcaggcttcctgcagttcggctactacggcgtgaacaactggatgccgtcctacctggaaagcgaactggggatgaatttcaagtcgatgaccagctacatggtcggcacctacgcagcgatgatcttcggcaagatcctcgccggtctcgccgcagaccgcctgggacgacgtaccgtattcgccgtcggcgccctgggcacggcggtcttcctaccggtgatcgtgctgttccagagcccggagaacatcctgtggatgctggtggtgttcggcttcctgtacgggattccctatggtgtgaacgccacctacatgaccgaaagcttcgaagcgaagtttcgcggctcagcggtgggtggggcctacaacatcggccgtattggtgcggcagtggcaccggcagcgatcggtttcctggcgtcccatggctccatcggcatggggttcctggtaatgggcggcgcgtacttcatctgcggcgtcattcctgcgttgtttatccgcgataaacagttcgatccgcaaaaacagtaagcgcggcgtccgtttgccaaataactggcgtcattcttcggcgactgtttttagcgataaaaacagtcgcttgatttgtaaggctttttatttaattgaacgaatgtggcatgaatctcgctctaaccctgttcaagcaggttaagcgatgacaagacgtgcggcagtgcccaggggttataacccatggtaaagcggtctaaactgtaactcatgttttacggaactgaaggaacagtaagacgcttggcattcgccactctcatcgagcctgtaagacagttgagtgcttagaggcgaaacggttatgaaaacacctacccagacccatgcaattgactttgacagtgccaaattgcaacgcctgggctttggccaacccgccctcctgccgcgccgccccaccaccgttatcgaacttcgccagcaactgggccagcaactgcaaaccagcctggaaccggagcgcattctcgcggtgttcttccgtgagatccaacgcctggtgcccttggacgccctgcactaccgtcaccaagccagcgacctgcgcctggagttcggccatcgcggtcatcactcgatgagctacagcctgagccatgaaggcgagcacctgggcgagctgatctttcggcgcaaccagcgcctgcaggaagaagaactcggccagcttgagtccctgttggcgaccctgctctacccgatgcgcaacgccctgctctaccgcgccgccacccgcagcgcgctgcgtgacccactgaccgagaccggcaaccgcatcgccatggaccagaccctgcaacgggaaatcgacatggcgcgccgccacctcaatccactgtccttgctgatgctggatattgaccacttcaagagcatcaacgacacccacggccacgccgccggcgataacgtgctgcgcactgtggcgacatcgatcaagagccagttgcgtaacgtagacatggtgtttcgttatggcggggaagagtttctgatcctgctgtccaacaccggtcgcgatgcggcggcgatggtcggcgaacgcctgcgccaggcagcacaggcccaggattactgggcggacggaacacggatcgaattgacggtgagcctgggttgctcgaccttgctggcggccgaatctgccgaaagcctgctgcgccgggccgatagtgcgttgtacgtggccaagcgcgaaggccgcaaccgcctggcgatggcggggtaacccccgccatctgctctgcatcaggcctcgctggcaacccgcgcctgacgctcacgcatcaccgcaggggctttttctttctccagacgcatgcagctttccaggaacaaatacatgtagtcatagcttttgcacacagcctggcgcagttctgcctgcaatgccttggtcgggttcatcccggccagggtgcagatgatctccagcgcttcccacgggtgggcgtcatcgtactgggcatgcatcttcaaccacttcatcgcacgcttgcgctcttcctcggggaaggccgccgcgtagacaccggtggaacacaccacggcggaccactcaccggtcgcgccttcgatcgcgtagttggtcgcggcaatggccacgatcagcgaatcggcagaactggtgtgccagcaccaatggctgagggcgtgcaactccggcggcacgtcctgggcctgtaactcgtccaggctcacgccgtgggcacgggcccaattgacccaataatcggcgtggttgagttccacacgaatattgcgcatcagccagcggcgcgccatgtcctccccaggatggcgggcaaatttggtcttggtcaggttctgtgccatgtacaaggcaaactgttccaccaccggccagccaccgatcaggtagtggcgcagggtcttggcgctgagcgtgttgtcgcgcatgcgctggtacagttcgtgttcgacaactcggcgcttgctctcgctacagtccaggatcagtttctgagcccaggcggggtaactcgaggcttccataagcgggccggttctgttgaatgtgtcgatcactgtaaggctcctttttaagtgtgattgtacagaccagcaaagttttcagcggaatgtgccgggcgccttgaataacagaggctgcggccgcacaggtcgacactgcaagctatcaaaggtaaacaattgcggtcgttcaatcaggtagccctgagcgtaatccacaccaatttcgagtaacgcctgttcgatgtgcggtgtctcgacaaattctgcaattgtgcgcttacccatgacatggccgatgtggttgatcacttcgaccatcgcgcggttaatcgggtcgtccagcatatcctttacgaaacttccatcgatcttcaggaagtctacaggtaaatgtttgagataagcgaatgaggacattccggcacaaaagtcatccagcgagaaatgacagcctaaggctttgagttcattgataaagcggatcgcactgcccaagtttgcaatcgcactggtttcagtgatttcaaaacagatcatgcccggcggaatattgtatgtatgaaacttctcacgcaaaaacccaaggaagtcatcatcaccaatggtgatgcctgacagattgatcgcacacatggccatggggcgccccgggcgttcctgcatgcagcggttgatgatcttgaacacattctccaccacccaacggtccagcgacgtcatcaagccatagcgttcggcggccgggatgaagctgtccggcaggatgatacggccagcctcgtcatgcaggcgcagcaggatctcgatatgcccattgccgccgtcggtgtgccccaggggtgagatttcctgggcgtagaggcagaaccggttctcctccagggccatgtgcaggcgctgcacccaggccatttcgccaaagcgcacggacagttccgaatcgtcggcgtggtacacctgcacacggttacggcccttttccttggccatgtagcatgccatgtcggcggcgcgcagtgaggtttccagggttgtcggggtatgcccaaggtgcaccaggccgatgctgacggtggtcatgaacggccggcccttccatacgaagtgcaggctttgcacggtgtggcgcaggctctcggcgattttttcggccaccgccgccgggcagttctccagcaggatgccgaattcatcgccgcccaaacgtgccagggtgtcaccttcgcgcaggtccgattgcaacaacgcacagatgtgccgcaacagctcatcacctgcggcatggccacaggtgtcgttgaccagcttgaactggtcgaggtcgaggaacatgagtgcatgccgcccgccctgctgcgaccccgtggggtgaagcacctgttccaggcgatactcgaactcacgacgattggccaggccagtcagggcgtcgtgggtcgcctgccaggacaggttggcgatgtattgacgctcctgggtcatgtcgtgcaacaccagcaccgccccggtcaccttgccggcgctgcggatcggcgcgcccaccagggtcaccgagaccgtactgccatccaggcgctggatggttttcgagtgctcgctgccgccgccaagctggcccttgacgatatgttcgatcaaggtaaagccatcgggctgggcattgtcatccagcaggttgaacagggccgccaggggcagcccctgggcctgggcagaattccagtgggtcagcgcctcggccgccgggttcatgtaggtgatggcaccgtcaacatcagtggtaatcaccccgtcgccaatcgactccagggtgatctgcgcccgctccttctcttgttgcagggcgtcggcaaaggcgtggcgttgggccagcagtttatgcgtgcgcaacagcgccagcacaatcaggcccaacgccgtggccaggttggtgatcaccagcagccgcaggatcatccgcgaaccttcgcccagggcatcgctgaacgccttggcagcgggcgtcacaccttcgttgatggcagtgatatgtgccttccattggcgcacatcgttggcgctgacctggtcgcggctgattgcaccgtgcatctcgcgggccaggtcatccagttgcaccagatagccatcgcccacggtccacagctcgatggctttttccaggtagctgaaatggcggaagttgaggtacagccagatcaggctggaaacgtcatccgggtggttaccgcccttgaggatgcccaggcgcgcggcagcaagatcaggggtggagcggtccagggcaatacgcaattcatgcccgccctggggcacggcgatcgcctgctggtatttgagataagtggtttcgtcgcggttgtcggcatacagcgtcaggtagtagatcgcatctttctggcccttggaccacaggctttcgccagccacataaccacgcaccgccgagagcacgtagaggctgacgcaacccaacaatgcctggaacagcaccacggcgataaagggccagacaatgcccaacaaccgtggcgttccgagagtccgcttttgcttcatgaagccccttgcacatgcactgctggatacgcacgcgaaacaccgcttccgatagctcagcctaggctaaatcaacgtacttgttgcaagtgcccgtagagtttggcgtacaaaccaccgtcagcaatcaattgctgatggtcgccatcctctgcaatgtgaccgccgtcgaacactaagactcgatctgcctgcttaaccgccgacaggcggtgggcgatgatcagtgtagtacggccgctgaggaagcgcgccagcgcctggtgcaggttgtactcggtggcggcgtccagggcggaagtcgcttcgtcgaggatcaccactttcggttcggccaacaccatgcgcgcaatcgccaggcgctgacgctggccgccggaaaaccgcaccccggaacgccccaccacactgtccaggcccatgggcaacgccttgaccgtcgcatccagttgggcgatttccagtgcctgccagcaggcctggtcactgcgctcgcggcccatagtcaggttggcgcgcacagtgtcgttgaacagcgcgggatgttgcagcaccacggcgacgtgctcgcggatggtctccaggccgatgtcctgctgggtggcaccgccaaagcggatagtcccggcctggggcgtgtacaggcccagcagcagttgcaccagggtgcttttgccaccgccgctggcgccgacgatcgcgaccttttcccccggtgcgatggccaggttcaactggtcgaggaccaggtcttcgccataaccgaaactcaggccacgcacttcgatgccgacggtttcgcgcccggtgaacgggtcttcgccgcccgcatattgcggctcatcggcccgtgccagcagctcgttgatccgcgtcagcgccccgcccgccgcatagtaggcatattgcaggttcagcaattgctccaccgggccgatcatgaaccacaggtaactgaacaccgcgagcatctggccgatggacaagtcggaaaacagcaccgtgagcatggccgccgcacggaagatgtcgatgccgaactggaacagcaacccgctggcgcggctggaagcatcggttttccactgggagtggatcgcgtagtcgcgcacttcctgggcccgctggccgaggcgcccgaggaagaagccctggcggttgccggcgcgcacttcctgaatggcgtccagggtttcggtgagtgcctgggtaaaccgcgaagtgctgtcgttttccagcttcttcaggtgtttaacgcgtttacccaactgcaccgtggcgtagatcaccagcgggttgaacagcaggatcagcagcgccagttgccaatgcatccacaccaggatcgccgacgtgcccaccagcgtgagcatcgccaccaggaaccggctgagggtttcgccgacgaatttatccagggtatccaggtcggtgaccaggtgggtggtgaccgtgccactgcccaggctttcgtattcgccgagggaaatacgcttgagccgttcgatcaggcgcacgcggatgcggtacacgatgtccttggccaaccgcgcaaacaaccgcgcctgcaccacgttgaacaccagcgcgccgcagcgcaggaacagcgtcaccagcaacatcaggccgatatagccggcggccttctgccagcccaggggcaaggcgtggttcatcactttgagtgcggcatcgccacgacccagcagcacttcatccaccagcaacggcaataacagaggaatgggcacgctgcacagggtcgccagcacggcgacgccattggcgatccacagggacttcttgtggcgcagggccaggcggcgaatttccgcccaggtcaggcggtcagtgcgttgaggttgctcatgcacaggtggctcgctccagccatcggcccagtagcggcgatagctcggacagcggctggtaaccgttggtcagcaacgccaactggccattgcgctcggccagcagcgtggggaaaccggcgatacccaggtcctgcacccaggtaaaatcggccgctgtggcggcgtgctgctcggcgcggtcaaattcgccggcaaactcgatgcgcgggatacccgcctgctcggccagctccaccagcacactggcgagggtcacatcgcgaccttcgacataaaacgcacgctggatcagccccagcagcttccacgcgcaatccggcgccaggctgcgcgccgtgacgatggcgcggcacgccggctcggtgtcatacacaaaaccgtcgggcagtgcgccgtcacgcttgaacggctggccggtggcgtcggtcaccgcctgccagtgctccaggatgtaccgtcgcgtggtcggctccagcgccgcgccgctgccggtgcgcaagccgcccaccaccagatgcagctccacgccggccgcctgggcctgctccaccaacgcctcggccaccggggcaaagccccagcaccaggaacacatcgggtccattacatagagcaggcgcgcggacatggctcaggcctcggaaggagtttgcttgtaattgaagccaatcgggtgcggcatgttacgggccttggccagctcgatctgcttctggcggtcaatcgcactgcggcgggtcttctccggcagcttatcccagcagtgcgggcagctgatgcctgcgacatagtgctcggaggcgcggtcctcaacactcacgggtgtgcggcaggcatgacattgatcgtagtcgccttcgctcaggtcgtggcgcacggtgacgcgattatcgaaaacaaagcagtcaccctgccatttggtttctgcctgcggcacctcttcgaggtacttcaggatgccgcccttgaggtggtagacctcatcgaaaccctcgctgagcatgtagctggaggccttctcgcaccgaatgccgccggtgcagaacatggcgaccttcttgtgcttggccgggtcgaagttggctttgatgtagtcgggaaattcgcgaaaactggtggttttcgggtcgattgcgccttcaaaggtgccgatcgacacttcgtagtcgttgcgagtgtcgatcaacagcacttccgggtcgctgatcagcgcgttccagtcctgcgggtcgacgtaggtgccgaccttcttgttcgggtcgacgccttcgacgcccagggtcacgatctctttcttgagcttgaccttggtgcggtagaacggctggtcgtcgcagtaggattctttgtggtcgatgtcgaccatccgcgggtcgttcttcagccaggccatcaagccatcaatgccttcgcggctgccggaaacggtgccgttgatgccttcttcggcgatcagcaaggtgcctttgatgccgttgtcgaccatcgcctgcagcagtggctcgcgcagggcgacgtaatcttcaagggtgacgaacttatacagtgccgccacgacaatcggttgagtcatgggtgttctctccaggtggctaccctcgtaaggggtgaaccggatgcaaaaaaaacgcgccggctaggcggcgcgttgcggattctaacaaatgcccggtgtcagagacacccgatcatcaatcatgcccgccggcgcaggtcggcgaggccggggctgcgtcgattttcgcccattcatcaggcgtgtaggtatgcagcgccagcgcatgaaactcgctcatcaggtcacccagggtggcgtagaccttctggtggcgcttgacgcggttgagcccctcgaactgcgggctgaccagcacggccttgaagtgggtctgcaagccacggctgtgcatgtggctttcatccagcacgctcaagtggtcggtgcccagggcggcaagcgccgtttcgatacgctgttgcatggtcattcctgcttacttcttcttggccggtgcggcggctttaggtgtcagctcgttggtcatgtcttccaacagcttgttcaccaccggcacggcgctttccagcttggcctgggtcatctgggccgattgctgggtcagttgcggcattttttccaggactttcttgcccagtggcgactggtagaaggcaaccaggtccttgagctcggattcgctgaagttggtggtgtagagcttgaccatgtccggcttcagcttcggccagccgatggcctggtcgagggcggcgttggccttggcctggtagctgtcgagtacggactgcttggcggcaggcgccttggtctgttcgaaacgctgggcgaacatttgctgcacttgcatgtacaccggggtacccagcttgtcggcatgggccagggtaaggaaggcttcggcactggcgttgtggctggcggtatcggcaagaacctggccgctggcgcaaaccagagcaaccgcggtacagatggcacgaagacgagtcatcgagtttccttttctagcaggcgaggtaagaccccaagggcgcccattctgcgcctaaaaaaccttggggctcaaccccgggccttgtcggacaaggattgcccgatgaaaagtctttcaggggaacccccaaggctgatcacagcctaaactgcgcaaacgaacctgaaggagtgtgcccgatgagccgtatcgaaaccgacagcctgggagaagtccacgtcccggatgacgcttactggggcgcccagacccaacgttcactggtgaacttcgccatcggcgagcagcgcatgcccctcgcggtattgcacgccctggccctggtcaagaaggcggcggcacgggtcaacgaccgcaatggcgacctgcccgcggacatcgcccgcctgatcgaacaggccgccgacgaagtgctggccggccagcacgacgaccagttccccctggtggtgtggcagaccggcagcggcacccagagcaacatgaacgccaacgaagtgatcgccggccgcgccaacgaactggcgggcaataagcgcggcggcaagagcccggtgcaccccaacgatcacgtcaaccgttcccagagctccaacgactgtttccccacggccatgagcatcgccgccgtgcaggcggtgcatcaacgcttgctaccggcgattgccagcctgtccggcgggctggcggagcaagccgccaaacatatgaagctggtgaagaccgggcgcacccacatgatggatgccacgccgatcaccttcggccaggagctttcggcattcatcgctcaactcgactacgccgaacgtgcgatccgcgccgccctgccagccgcatgcgagcttgcccagggcggcaccgccgtgggcaccgggctcaatgcgccccatggcttcggcgaggcgattgcctcggagctggcggcgctgtcgggcttgccgttcgtcaccgcgccgaacaaattcgccgctctctctggccatgagccgctggtgacgctgcacggtgcgctgaaaaccctggccgtggccctgatgaaaatcgccaatgacctgcgcctgctgggctccggcccgcgcaccgggctggccgaggtgaaattgccggccaacgaaccgggcagctcgatcatgccgggcaaggtcaacccgacacagtgcgaagcactgtcgatgctggcctgccaggtgctgggcaatgacgtgaccatcggcattgccgccagccagggccacttgcagttgaatgtgtacaagccggtgatcatccacaacctgctcgagtcgatccgactgctggccgacggctgcaacaacttccaggaacactgcgtggccgggctggagcccgacccggtgcagatggccgagcacctggagcgtgggttgatgctggtcaccgcgctcaacccgcacatcggctacgacaaatcggccgagatcgccaagaaggcctacgccgaagggttgacgctgcgggaggccgcgctggagctgggctacctcaccgatgcggagttcgaccagtgggttcgccccgaagacatgctgggcgcctagcctaggatgccatgcgcaaccgccgggccttgagcccggcgagcaacgacggcgccagcgccacggtcgccgagcccagcaccaccaccaacgccccggcatagcccagggcgttgatctcttcggcctgcacatagtcgggccacagccaggccgccagggccaccgccacaaaggtcaccaacggcgtgagtgccagggtcgcactgacccgtgaggcctcccaatgggccagcgcttcggcaaaggcgccgtaggccaccagggtattcatgcagcacccgagcaacagccagccttgcagcgggctcaggtccaatgcctccagcggatgcgcccaaggcgtaagcaatatggcgcaggacaggtagatcaccatcatcacctgcagcgagttccacaccgtcaacagttgtttctggccgagggcatagaacacccagatcgtggtggcgagcaggatggtcagcacgccggcggtgtaggcgccgagcgaggtcagcagttcttccaggcgctggttgaagaacaggccgaatcccaggatcagcaccaccaaccccaacccctgccccaggctgaagcgctccttgaagacgaacacactggcgaccatcaaaaagatcggccccatctgtaccaccaattgcgcagtgccggggctgagcaatttcaggcccaccaggtacagcacgtagttgcccaccagcccgcacaccgccatcgccaccagccagccgcccttggggccgagtaccttgcggctgggcagacgtttggtcagcgccaggtagatgaacaggcaactgccggccacgatcaggcgaaaccaggtgacggtgatcgggtccatcacctgcagcacctgcttgagtttgatcggcagaatgccccacaggaacgcggtcagcagggtcaggagaaaaccatagacccagcggccggaagagatgtgcatgagtaccccagaagccggaggaagtggagccgcattctaggggcacccgatgcactttgtgtagcgaacacttaacttgccgatcagcgcaccgcttcgaacaacccggtggcccccatgccgccgcccacgcacatggtgacgatgccgtaacgcaggttgcgtcgctgcaactcacgcaccaggtgccccacctgccgcgagccggtcatgccgaatggatgaccgatggaaatcgagccgccgttgacgttgtacttggcattgtcgatttccaggcgattgcgcgcatacaggcactgcgaggcgaacgcttcgttcagctcccagaggtcgatatccgccacctgcaagcccttggcctggagcaacttgggcaccgagaacaccgggccaatgcccatctcgtccggctcgcaaccggccacggtgaagccacggaaaaacgccttgggcttgagccccaacgccagggctttttccaggctcatcaccagggtcatcgaggcgccgtcggagagctgcgaggaattgcccgccgtcaccgagccatcttcggcaaacaccggcttcaaaccttgcagactcgccagggtagtgtccgggcggttgcagtcgtcacggtcaaccacgccatcaagaatctgcacttcaccggtgtgcttgtcctcgaccttgtacttgaccgccatcggcacgatttcatcgttgaacagcccatcggcctgggcctgggcggtgcgctgctggctttgcagggcgtacaggtcctgttcttcgcggctgacgttgtagcgacgcgcgacgatctcggcggtctggcccatgggaaaatagatacccggcacctgctctttgagcagcgggttgatcaggttgtcggtgttgacgcttttcatggtcaggctgatcgattcgacgccgccggcaacgatgatatcgctgcaacccgaagcaatctggttggccgcaatggcaatcgcctgcaagcccgacgagcagaaacggttgagagtcatgccggctacgccagtgcccagttgcgaaagcaccgccacattgcgcccgatgttgtaaccctgggcgccctcgttggagccggcgccgacgatgcaatcctccaccgtcgccggatcgataccgttgcgggtgagcagcgcgttgacgcaatgggccgccatgtcatccgggcgggtctggttgaacttgccgcgaaaggacttggccaggccggttcgcacgctgtcgacgatcactacttcacgcatgggctacctcgatcttgtggttgttggatcgagcatagatcccaccctgcgccatcgcgacgatcattcaccccatagatacaaaaccatggcggcccggctcaccgtggcgagcaggcttgttgtggcgagcaggcttgccctgcgttggggcgcgaagcggccccgaatcaggcaccgcggttcttcaggcacgactgagttggcaggttttagggctgcttcgcagcccaacgcggggcaagcccgctcgccacaacgagctgcatcattatttctttttctttttgtcgtgcttgtcggacttggcgaacgcctcttccagcgccaggttgatcgtgcgcaacaccttgacccgcgcccagcgcttgtcattggcctccaccagggtccagggcgatacctcggtgctggtgcgatcgaccatatcgcctaccgccgcgcggtagtcgtcccatttgtcgcggttgcgccagtcgtcttcggtgatcttgaagcgtttgaaagggatttcctcgcgggcctggaagcgctccagttgcgtgtccttgtcgatggccagccagaacttgaccacgatcacaccggcatcgcgcagttgctcttcgaagtcattgatctcgccataggcgcgcatccagtcggcaggggtgcagaagccttcgatgcgctccaccagcacgcggccataccaggagcggtcgaacacggtgaacatgccgcgtgccggaatcttctgccagaaccgccataaataaggctgggcgcgctcgtcttcactgggcgcggcaatcggcacgatgtggtactgacgcgggtccaacgccgctgccacccggcggatcgccccacctttgcccgccgcgtcgttgccctcgaacaccgtgatcaaggcgtgcttgcgcatgcgcttgtcgcgcatcagtccggagaagcgtgcttgttcggtgatcagttgttcttcgtaatcgtccttgtccaggcgctgggacaggtcgaggctgtccaacaggctcttcttgtccaccgaggcgatcaagggcgccgggttcatgccgctggccttgcccttgggcagcttgagcgcattctgcaggccttcgagcaggagtttgcccacggtgaggctgcggtagttgctgtccacgccttcgatcacatgccacggcgcatagtcgcggctggtgcggcgcaacacgcgctcgccgaagtgcacgaatttgtcgtaagtctcggattgctgccagtccagcgggctgatgcgccagctgtgcagggggtcatcggccagggccttgagccgcgctttcatctgctttttggagaggtggaaccagaacttgaagatcagcgcgccttcatcgcagagcatcttttccaggcgttcggcgccggcgatggcctggtccaggcgggcgtccttgatctgcccatgtacacggctttgcagcatctggctgtaccagttgccaaagaagatacccatgcggcccttggcgggaagttggcgccagtagcgccaggccggcgggcgcgccagttcttcgtcggtctgctggtcgaaggtgcgcacttcgatcaggcgcgggtccatccattcattgagcagcttgaccgtctcgcccttgccggcgccttcgataccgttgatcaggataatcaccgggaagcgcttctgctgctgcaactcgtactgcacctccagcaaggcttctcgcaatgcaggcacttcggcctcaaaggtgtctttgtcgatggcgtgaccgatttcggcggattcgaacatgggcagctccgtttcaagatggctcaagactagcggattgggcaacaacacgcgggaggaaattccaccggcgcttgccgtgggtcaattcaacgtcggttgatcggctagaatgacggccttgtctttaccgagccgcccatgaaccctatcacccacgcccagctcgactgggatgaccaaggtcgcccgcactcgcgaatcttcgacgatgtgtacttttccgataagtcgggccttgaagaaacccgctatgtgttcctcgaacagaaccgcttgcaggagcgctttgccgcgctgcccgccggtgggcggctggtgattggtgagaccgggttcggcacggggttgaatttcctctgcgcctggcaactgttcgaacaacacgcggtagccggtgcgcgcctgcatttcgtcagcgtggaaaagtatccgctgagccatgccgacctgcgacgcgccctgctgctctggcccgaactgcaccccttcgccgaacaactgctggcgcaatacattgccatccatcagggcttccagcggctggtgctggataacggccgcgtgaccctgaccctgctgatcggcgatgccctggagcaactgccgcaactggatgcgcaaatcgacgcctggttcctggacggcttcgccccggcgaaaaacccggagatgtggaccgccgagctgtttgccgagctggcacgcctggcggcgccgggctcgaccatcagcacgtttaccagcaccggctgggtgcgtcggctgatcaacgccgccgggttcaagatgaaacgtacgccgggcattggccacaagtgggagatcctccgtggggagtttctcggttggccggccgacacaccggtaccggccgcgaccaagccgtggttcgccaggccgcccgcccttgcgggtgagcgtcacgcactggtgatcggcgccggcctggcgggctgcgcgacagcggccagcctggcggccaggggttggcaggtcagcctgctggagcgccatgacggtgtggcgcgggaagcctccggcaacccccagggcgtgctgtacctgaaactgtcggcccacggcacagccctgtcgcagttgatcgtggcggggtttggctacacccgccgggtgctggagcacctgcatcgcggcgtcgactgggacagttgcggcgtgctgcagctggccttcgacgccaaggaagcccaacgccaggcgcaactggccgctgctttcgcgccagacttgctgcacctgctcgaccgcgaccaggcccaggcccgcgccggtgtcgcgctggcgcacggtgggctgtttttccccgaaggcggctgggtgcacccaccggcattgtgcgaatggcaagcacaccagccgggcgtgaccctgctgccctaccacgatgtgctcgacctgcggcacgtcgacggtcagtggcaagcctgggacgctgagcgcctgctcgccagcgccagcgtggcgatcctggccggcgccgccgaggtccagcgcttcgccgacctgcccctcaagcgcattcgcgggcagatcacccgtttgccgcagaccgcctacagccaggccctggccacggtggtgtgcgccgaaggctacgtcgccccgccacgcctgggcgagcacaccctgggcgccagtttcgacttcaagagcgatgaccttacgcccaccgccgctgaacattccgggaacctggagctgctccagggcatttccgaagacctggcccagcgcctgggcgccgacagcctggcgccggaagccctggaaggccgcgccgcgttccgctgcaccagcccggactacctgccgattgtcgggccattggctgaccgccaggcgttcgaccaggcctacgccgcgctgcgcaaggacgcccggcaagtgcctggcgccgcctgcccgtggctggacgggttgtatgtcaacagcggccacggctcaagggggctgatcaccgccccgctgactgcggagctactcgccgcctggctggacaacgagccgctgccggtgccgcgcgcggtggctgacgcctgccaccccaaccgtttcgccgtgcgggcgctgatccgcaccaccaccggcaaggccgaatgatcaaccggccggggcctcacacacggggcccagcccttcggttctgatggcgtcctcggtcaagcgctcgatcagcacgctttcagcctgctcccgttcactgaggacggtgtgcatgcgactccggtaatcggcatcgctcagtaccaggctttgttcgaagatgtcattgaggcgctcatcatagggcgtgttcaaggcctcgaagcgagctgcatgggcacgcttgaggtagtcggtccagaacggcagcttcttgagatacgtcatcagctcgggggacagctcggccagcgtgacttcggccttggcttcatccagcgccaactgagtgacctcccccagccgcgaatagcgcatgtgtcgaggctggccgggcaaatagaattcgccgaccaggcctgtgcggaacgccaggctgacctccaatggatcggcggcaggatgcaggccactgtgacggcgcgcaatcgcctccaactgctccaggcgaaacaggccacgacccagtttcaacagcggcttgggcgtcagcgcacgcccctggatgagggccttggcatcgctgatttccaccaggacttccaggctgctgaagttgacggcggcggcatcgtcacaattgatcggcgtggcggcccggtcgaatacttcctcacgcagttcgctgttcattgcggcagcctccagcacccgccaaacgcgtcgctgcaggtcctcacgcacgaactcggcgtctttggtgccgcccagttccgcgagcaacttgaacagggcgtccgaccggtgatcgtccttgaggctcgtccacgtgagtttcttcgccgcatagcccgccatccgttcgtccgccagccacagttcgcgtgcgctctgctcgttcaagcgggcaatgtcatcttccaggaaccccatgcccggaccgtacgcctgacggtagtttttcagggccagttggctttgcgccgataacgggttgtgccgcaagttgacgccctgggcaacgtttcgcggcacgcgtagtagccactccggcagcacgctgatgtcattggcgcgcaaattgatatgttcaagataaggcaggcgccacaggtccctgggcagttccttgagtcggcagttgcgcaacaccaggctacgcagcgcgaacatacggctgatatccggcgggtccagcaacgggttgtccgccaggttcaacaccttcaggcgcgtcagatcggccagcttggcacgggtgtattcggtgagctggagtttgttgttgctcaggtacaaccgctccaggcccggcatgtgcaacagggcttcaggtagccgggtcatctggttttcgcctagttcaagggtgcgcagccccttgaagtggctgaggaaatacgccacatcgtcagtcaggttcaaacggcgcagtgacaaatgctcgacgtgatcgaaacgcacctgtgcgggcaatgtcggcagagggccgatgaccatatcatcgagcaacagcccaggaacctggctggcgtgctcatcgggcagggtcgacatccgtcgccagcacttttcgatgctcttcgccgcctggtggcggctcaatcgatagtcccacagggggtcggcctgcacgatattgacagacttctcggcacgccagcgtttgagtgccgtgtgcagcgcttcaaactcctgctcgcgtgcctggaccgccttggcacgcgacagatgatcatggcccgcatcgcgcaggaaatcgttgacctgcgacggactgagcaagggatagagtttgttgactttacgcaccaacgccgccgggaaatgctctgcctcggctcgcgccgcctgggtacagatcagcggctcttcgtccagcagcccgcgttccggccacaggtaacgggcgaccctgtcacgctcatgcaccgcggtagcacgcaggcggccgcgcaggtcggccgcctcgttctcggcctgaagcttcaatgcaatgcgctggcgtggcagcaggctatcgaaaagcgccgtgtacaagccgtccgcgcctgtcgcgaccggcccgagggccttgcctttttgatcgaatgcctgatacccctggggcgtactgaccagggtcctctgcgttgcagctgttgacgcgcccgcctcggccagcacctccccgctcagggtttgcctgcgcacctgcaacgccaggtctcggggccagccgggcatttgctgcagcataccgacggccacgcgtcgggtgccgtcccccgccaattccggccagtacaggcccatcagtgcgcggtcctgctccaacaggtccaccgtctcgcgcgcccgctgggcaagcaccagcggtacctggccggtggtgcgcaaataccggcgctcccataatgtggcctgtgagtacagctcccacgccatgcggggcggcagttgtttgaagcgctcgcacaacggcaccaattcgttcagggcaacaccggcgtaataggtgtacaaatggtcgaacacggcttgatgccggctacgcagcgtgtccagcagacgacgctccagcgtactgcgcatgtcgtcttccgccacacccttgcccaacaggtcgccacgttcctcgtcgctcaagtgctccagcaaggtgtccatgacccgcccgtccctcaactccttgcgggtgatatggatgctcaggtcctcataatcgaaaggtgctgtttccggatgcctttccagcagttcgccctcctcgtccagcacctcgaaaaaacgcccttggggccagcctggcaccagcggcaatgcaaacaattgcgcgcgtgcggtactcgcatcgggacgttcaccacgctccaggtactccatcagctcacgaaccctgtcgttttgcttatagcgcagcactgcgtcatgaaaacgctcgggtaacggctcgtaggcactgcccaacgcctgcaggtgtggcagggtcattcctgtgagggtcgccaggttcgacaatggctcagcgggcaattcgtcaaggcttggatccagtcgcctgaggctgtagacggggtcttcccattgcaaggggcgctcgtagacatgctgccagccaccacggaagttgtgctccagcggcgggcgataagcctgcggacgccgtggatggatgacccgccacttctgcaatcgggtatcgaacgcaaccgaatagtggtttccccccatgcggatgtaggagcggccgttgacttggtacacccctcgagaactggccacggcctggcgtgcgaccggctcaggctgtcgataggcattgagccttggccgccagagtttctggccctgatcggcagtgttgacggcttcgaacttctcgaagaactgcgcagacgttgtcagggtgcgcttcaacgtccccactacccgcccgcccgccacgaacaacgccatggccgcgatattttcagccacattcaccagatgcttgagggcctcggtatgctcatcgtgctgccagtcctcgacggcctcgaacacttcacccaacagctgtccgacggcgaccccgagcatcaactgccccaacaccggcaccaccaacgacgccacattcagcaggtccagccccaggtccagatagcgctgcatgcgctcttcactggcttgctggtcgacctgggccttgggtaccgccagtaccagcgcgtccaactgtatcttgccgacaaatgcctgaaagaagaacccggtcaggctggtcgtgacgggtaaggcacgcagctggccaaccttgcgcgtcatgtcgaacgagtcgaaaaaatccaggcggttgccctcatccacgtacccttcgaaaaacgtccggtagctcttgatttgcagcttcaaggacaaatacaccttgaagtcttccagcgtcggatactcgtaccagggcctggagggctcgttcggcatgtagacaataaaggggccggtatccaggctgcccggtgcgctgtcggaaaacaccaatacactccacacgcaggtgccatcgatgttcaagccctgccaattgatcaggccgttgcccggcagcctgctcctgagttcactggccggacgatcgaacccgatcagcttgagcaaccgcgcgtaggtcccggcttcgatatgccccttgcacaaggcaatatgcagatccatgcgcatgtccatgagtttgcccaggccaatactgacggcaacctggttgtaggagctgacttcctctttgcttttcgggtcgggcaggtcgaagacctcttcgatgtgcttttgatagagcgcccccaggtccagctcccggcaatgaccgacaaattcaggcaccgtcatccccaccatcggctgcctggtggccgcagagcgcactacagctgcgacggacatgcccccgggctcagcgcgctctgcagagaaattctgcatcgccgcatgcagcaggctttgcttggtataggtaacggtctggagcaagccgccgcccaggtccgggctcaccccagtgagcttgcgcctgggcaactccagcaggtctcgcctgacatccggcgactccacccctttggcccgcagaaaattggtcaagcgctctgcgcagtattgatccagcggttccaggcggctcaacaggtaacggacattctcacgaatcaccttgctgtcgatatgcgtctgttcaagggcggtgagtgtcgaagcgtcggcttcaaccaaccagtgcggcacggttttgcgcaaaacctgcgccttgtccaggtcggcggtgatgtcgagcaatgccctgtccagttcatcttgagtcgctcctgcggcgacctcactcaaatcgcgtttttgcgtcatcggcatgtttcctcagccagctgaacatgaagccaaacgataagcctggaccgggccgcatccgggtatctgtctaccgccctgcaaccaccttcatccgcttataaccgattgatctaaaactccacgaatagccccgtgtcagtttctgggtacgcgccctgtcgggcgtattgagttttatgctccccaacggaaaaaccggtaaggaatttatgtgcggattagctggagaattacgtttcgatgcccaacctgccgacctggcagcgattgaacgcatcacccatcacctggccccgcgaggcccagacgcctggggctttcatgcccaggggccgatagccctgggccatcggcgcctgaaaatcatggacctgtcggacggttcagcccaaccgatggtcgattcgcacctgggcctgagcctggcgttcaacggcgcgatctataacttcccggaattgcgagaagagctggaagccctgggctacgccttctattccggcggcgacaccgaggtgctgctcaagggttatcacgcctggggcgaggcactgctgcccaagctcaacggcatgtttgccttcgcgatctgggaacgcgatgcccagcgcctgttcatcgcccgcgaccgcctcggcgtgaagccgttgtacctgtcgcgcaccggtcagcgcctgcgctttgcctcggccttgccggcgctgctcaagggcggcgatatcaacccgatcctcgatccggtggcgctcaaccattatttgaatttccacgccgtggtaccggcgccacgcaccttgctggcgggcattgaaaaactgccacccgcgagctggatgcgcatcgatgccagcggcaagaccgagcagaagacctggtggaccctgccctacggcccacgcgaagatgaaaaaaacctgagcctggaagactggaccgaccgcgtgctcgatagcacccgcgaagccgtggccatccgtcaacgtgctgcggtggatgtgggggtgctgctctccggtggtgtcgattcgagcatgctcgtcggcctgctgcgtgaagtcggcgtacaggatttgtcgaccttctccatcggctttgaagacgccggtggcgaagccggcaacgagttccaatactcggacctgatcgccaagcactacggcacgcgccaccaccaattgcgcattgccgaaagcgagatcatcgagcaactgccggcggccttccgcgccatgagcgagccgatggtcagccatgactgcattgccttctacctgctgtcgcgggaagtggccaagcattgcaaggtggtgcagagcggccagggcgccgatgagctattcgccggttaccactggtacccgcaggtggacggtgcggccgatccctatgcagcctatcgcgatgcatttttcgaccgcagctacgacgactatgccgccactgtcgcgcccaaatggctgaccgccaacgatgcggcgggcgacttcgtgcgcgaacatttcgccatgcccggcgccgatgcggcggtggacaaggccctgcgcctggacagcacggtgatgctggtggacgacccggtcaaacgtgtcgacaacatgaccatggcctggggcctggaagcacgcacgccgtttctcgactaccgcttggtcgagctctcggcccgcgtgccgggtaagttcaagctgcccgacggcggcaagcaagtgctcaaggaagcggcgcgccgggtcatcccgagcgaagtcatcgaccgcaagaaaggctacttcccggtgccgggcctcaagcacttgcagggcgataccttgaactgggtacgcgaactgttgctcgacccgagccaggatcgcggcctgttcaactccgccgcgctggaccgcttgttgaccgacccgcagggccaactgacgccgttgcgtggctccaaactgtggcaactggcagcgctgaacctgtggctcagcgaacaaggaatctgattgatgaaacctctcgcagcggcctatagccaacgcttgctcaagggccaggcgccgacctacgagcgcctgcaggcgcgcctggcggaagacggcagccccctgggcgccgagccgattgcggtgcattgcggctggggccggttgttgatcgggcataccttccccgacccggccagcctggcccaggaactgctccatgagcagccgggtgagcgtgatatcgcgttgtatgtggcggcgccccagcagatcctggggattgatccccagcagctgtttctcgacccctccgacacgctgcgcctgtggttcagcgactatcgcccggctacccgggtgtttcgcggcttccgtattcgacgggtgcagaccgaggccgattggctggcggtgaatcagctgtaccaggggcgcggcatgctgccggtcgacgccgaacgcctcacaccgcgccatcaaggcggcccggtgtactggctggcagaagacgaagacagcggcgcggtgatcggcagcgtgatgggcctgaatcaccagaaggcgtttcatgacccggaaaacggttgcagcctgtggtgcctggcggtcgacccgcaatgcacgcgacccggcgtgggcgaagtgctggtgcgccatctggtggagcatttcatgagccgtggcctgagctacctggacctgtcggtgctgcacgataaccgccaggccaagaacctttacgccaaactcggtttccgcgcgctgaccacctttgcgatcaaacgcaagaatgggatcaaccagccattgttcctcggccctggcccgcaggcggggttcaacccctatgcgcggatcattgtcgaggaggcccaccggcgcggtatcgatgtgcaggtggatgacgccgatgccggcttgttcacattgagccatggcgggcgacgtgtgcgttgccgtgagtcgttgagcgacctgaccagcgctatcagcatgaccctgtgccaggacaaaagcctgacgcacaaggtgttgaaggccgccggattgaaactgcccgcgcagcaactggcgggcagcgcggatgacaacctggagttcctcgatgtgcaccagcgcatcgtggtcaagccgctggatggcgagcaaggccagggtgtggcagtggatttgcagagtatcgaggaggtgcagcaagccattgaagcggcgcggcaattcgacagccgtgtgttgctggagagtttccaccaggggctggacctgcgcatcctggtgatcggcttcgaggtggtggccgccgcgatccgccgcccggcggaggtgactggtgatggtcatcattccatcggtgcgctgatcgaagcccagagccgccgccgccaggctgcgaccgatggtgaaagcaaaatccccctggatggcgaaaccgaacgcacgctgaaagccgctggctatgactacagcagcatcctgccccgtggccaggtcctgtccgtgcgccgcaccgctaacctgcacaccggcggctgcctggaagacgtcaccgccatcctgcaccccacgctggtggacgccgccgtgcgcgccgcccgcgccctggacatccccatggtgggcctggacctgatggtgcccgccgccgaccaacccgagtacgtgtttatcgaagccaacgaacgggccggcctggccaatcatgaaccgcaaccgaccgcggagaaatttgtggatttgttgtttccccatagctgaacgatccgaccttaggagtctttatgagccgaaccatccccgaaccggatctgaactacctgcaaaaagtgctgctggaaatgctcgccattcccagccccaccgggtttaccgacaccatcgtgcgctacgtcgccgagcgcctggaagaactgggcatcccctttgaaatgacccggcgcggcaccatccgcgccaccctcaagggccagaaaaacagccccgaccgtgcagtttcggcacacttggataccatcggcgccgccgtgcgcgccatcaaggacaacggccgcctgagcctggcgccggtaggctgctggtcgagccgctttgccgaaggcagccgcgtcagcctgtttaccgacaacggcgtgatccgtggcagcgtgctgccgctgatggcctccgggcatgcgttcaataccgctgtggatgaaatgccggtgagctgggaccatgtggagttgcgcctggacgcctactgcgcgacccgtgctgactgcgactccctggggattggcatcggtgactatgtcgccttcgacccactgccggaattcaccgagagcgggcacatcagcgcccgacacctggacgacaaagccggcgtcgcggcgttgctggccgcactcaaggccatcgtcgacagcggcgagccgttgctgatcgactgccacccgctgttcaccatcaccgaggaaaccggcagtggcgcagcggccgccctgccctgggacgtcagtgagttcgtcggcatcgatatcgcgccggtcgcccccggccagcactccagcgagcatgcggtgagcgtggcgatgcaggattccggcgggccgtatgactatcacctgtcgcggcatttgctgcgcctggcgtccgaccacgagttgccggtgcgccgcgacctgttccgctactacttcagcgacgcccactcggctgtcaccgccggccacgatatccgcaccgcgttgctggcgtttgggtgcgatgcgacccacggctacgaacgcacgcatatcgacagcctggcggcgctgagtcgtctattgggcgcctacattctcagcccgcccgtgttcgccagcgatgcacagccggcacagggttccctggaccggttcagtcaccagatcgagcacgagacgcagatggagagcgacacgcgagtgccgtcggtggacagcctggtgggcaacaagtcctgagactggcaactacggtcccggcgcagtaggatcgccgggatccatcacccgaggcttgtatgctgattccctacgatgcacttgaagtcgagacgctgacgcgcctgatcgaagacttcgtgacccgcgacggcaccgacaatggcgacgacacgcccctggaaacccgcgtgctgcgcgtgcgccaggcgctgaccaagggccaggcgctgatcgtgttcgacccggaaagcgagcagtgccagttgatgctcaagcacgacgtgcccaagcatctgttcgactgacgtcagagattgggcaccggcaccggatgggtgctggggtcctggcgatcgcggattttctgatgcacctccgcgcgatgcacatgcaccccggccggcgcttcaacgccgagtttcacctgggtaccgttcaactcgaggatatgcacggcgatgtcatcgccgatggagatgacttcgcctatggcgcggcttaagaccagcatggcggttgtccttttaacagtgaaaggacctcgaccatgcgcgcaggctgtgctgcgcatcaatggcttgccgtgaaatcaggcactacttacatgtgtaggtaaaatacctgacagaccactacccgatcagcccttggcagcctgtgccttggcgcgcattttgtcggccatgctggtcatttcgtcatacagcaattgcgggttcttctgcttcaacgcccatgccatgcgcccctgctcgtggggcaggatcatgaactcgccctccgcgacccgctgatagatgtagtcggcgatatccgccgccgaaatcggcgagctttccagcagcttgcccacctgggccttcatggcgggggtcggcccacggaacgaatccaggagattggtctggaagaacgatgggcacaccacatgcacaccgatttcctgctgcttgagttccaccagcagactctccgacaacgccaccacaccggccttggccacgttgtagttactcatggccggcccctgcatcagtgcagccatggaggcgatgttgatgatgcggcccttgctcttttccagcagcggcaggaacgccttgcagcccttgaccacgcccatcaggttgattgcgatctgccagtcccagtcctccagggacaactcggcaaagaagccgcctgacgccacgcccgcgttgttgacgatcacatcgataccaccgagcttgacctcacaggcctgggcgaatgcggtgagctggctgtagtcgcgcacgtcgcagcgctggataaaaccttcgccaccggcctcgcgcaccaacctgagggtttcttgcaggccgggctcgctgacatccgacaaggccaactgccaaccctcacgggcccagcgcagagcgatttcacgacccaggccggacccggcgccagtgatcatcatgcgattttgcataggaagctgccttgtggttcacggaagaagtgatcggcagtgtagcgaaggtttttcctgcccccatccaccatcagagtgatgaatgcccctggcaaaccgtgggccgggtcggatgtttgcgtatagcctaagttcaatatttttcaactaataggttttagttgcgagcgcattaaaagaaataagcacgtttgcgaaatgctttaaaaaaatactgaattttctgcgaggggccatagtcggagttgttaaggcgtctgtctttaatatgcgggcctatcgttaaacaaccggtctttgcagaaggccaataaggaaaaaaaccatgagcctcattctgatcattatcctgatcctgctgctggtcggcggtttgccagtgttccctcactcacgcaactggggttacggcccgtcgggtatcctgggcgttgtcctggtggtgctgctggtactgttgttgcttgggcgtatataaacgccaggcaaaaaaaagaggccctttaaagggcctcttttttatggccgattaattagtccggcttgccgttgactacacccgcggtgttatccaacagactcttggtggccgtctgcaggaacgactcaagtttctgcttcagcgccgcctcgtccggcgactcggggattactttaccggtcgggttggcgcccagttcgtattcccacaacttcggtggcatttccttcggcagcaccagaatgcggtctgcggtcaccaacgccacggtctgatcgctgcccgatggcttgatcacgccaaaacccttatcgccttccggcaggttcaacaggtcacggccccagcactggtgcagggtatcgccaccaaggcggcccatgatggttggcacgatgtcgatctgggtgcccacggtgtggtcacgctcgccgaacttttcctgcatgcctggcgcgatcatcagcatcggcacgttgaaacggcccaggtccatttcggtgatctgctgctcgttgccgaagccatggtcacccacgatcacgaacagggtttccttgaagtacggctccttgcgggccttctcaaagaactggcccaatgcccagtcggagtagcgcatggcagtcaaatgctcgttgaggctgccacggtcggtgactttctctaccggcaatggcgtcggcaacgcatacggcgtgtggttggacagggtttgcagcaacgcatagaacggcttgccgccttcacgcgccttgagctcttccaggccacggttgaacatatcctggtcggacacgccccacgtcgggtcggagaacaccgggtcgacgaagtcattgcgaccgatgaagttggtcatgccctggttgctgaagaagcccgactggttgtcccaggcgaaatcgccgttgtacacatacacgtcgtcaaacttgcgcgcgctgagcaactgcggcaggcccgacagcttgtgggtgccttcgggggtctgcatcaggtattcgaagcccggcaggttcgggaagcacgccatggtggcgaacatgccctggtgggtatgggtgccgttggagaagaaacggtcgaacagcaggccttccttggacagtttgtcgaagtacggcgtgatgttgcctggacgacccaaggcgccgaccgagtgaccggcgaagctctccatgaggatcacgaccacgttcttgatcggcagggtcttctcggccggcggcatgtagtcgcggcgcacggcagcgatgtcggtatccaccagcttctcttgcggcagcaccagcatgtcacgcacggtctgggtagccagcggctggtcgagggtggccttccagatgttggaacggtcttcgccgaagcgggccttggccgccgcaatcagtgacaaggtgccattgaggcccaactggttggcgaagttggagtcggtggtgtacacatcaccccaacgcagtggcgggccttggcgcagggtgccacggatggcgaccacggcgatcagcaggcagaccacgaacaccgcgatacgcgtgtaccaaggcgccacctggcgcgtgccgatgctgccaccgctgaacgggccacgcggacgtgtggcgcggtcggcgcctttgaacgccatgctcaggatcaacgtacccacggcccaggccagcaggtagcgcaccaccggaaaaccgtaccagagcatgctcatcacggtcttggggtcttccttcacatactggaagaccaggccgttgaggcgctggtggaactcgcggtagaagtccatctccatcaggcccaggaacagggcaatgctggacgcgacggtcagccacagacggaagaacccacgcgcggccatggcgcggacgctgaacaaggccagcagcagcgggaccaacgcgtacatcacgaagcggatgtcaaagcgcgtgccattgccgaacgcttcgaggaaggtcgaggccggcgtgtcgaggatcatttcgcggttgtacaccagcagcgccaggcgcagcagggagaacatcaccatcatgaccagtgcgcagagcagcgtgtacgccagatgggatttgacggtcggttgcagcaggcgattagaagctcgctgctgactcagggcgtccgggtttgccatgtcgtttcaggacccattggaagtttaagtgacgaagtagtgcagtggcgcgaatggtgcccgatcaacggcggcaaggctattaattactgaacgtgcaccggcgctccgcctttagcggctcttgggatagggccttggcaggaagataaagccggcgaattgtcttggacgggatgtgaaaattttgtgcagcgaatatttcgaaacacaaaatgaattgaagggaaaagccatggcctggcagctgtcgagccggggttcgacagctgccaggccgggcgcgcgatcagatccgcacattaccccgtggcccggcaatcgcccagatgatcaggcccagcaccggcagcagcaggatcaacaggatccacaacaccttggcgcccgtgcttgcgccgcttttgaacacgttgatgatcgcccagatatccagcgcgaggatgatcagcccgatcaagctattgaacgtggaacccatggtgtcgctcctaagtgagggcatgcccttgtaggatagtcagccctggcgggggttccgttttatttcagacgtgaacggcgactttcagcgcttccagggacggttcgcccttgatgcccacttcagcgcacagctccagcacgcgcggcaggtcgttgccgtagaccagcaccgcctggatttcgtcatcgagcaactggctgaagttgagcaatacgtagccgccatcctcggggctgagggcgctcatctggatctggatgcggttgagtgcggtcaggtcttcggtcttggccagttgcttgggcttgaggttgaacgccacgccggggccgaacgacgcgacgatctgcgcgaacaggtcaccataggtgtcggcctggaacagtacggtgtccggcaggctgccgaccaccacccactcaccgagtgggatggggaaggtgtcgtcgtagttgatatccgggttggccgccagaaacgcggccgggtcggcgtaagcctgggccgcttcatcggcgatgcgcgccacctcgtcctcgcccatgacgccggcgctgattttgctgatgagttcgacgagggcggttttcatggaaatgatcctgtagcgggctggcttttgagggcgcgtagcctacaccagtttctgcaactgcgccgccgtatccaccgcgcccatggtctgcgcggcagccagtgcggtggcgccattggcgtcggtggccttggggttggcgccctgccccagcaggtaatcgaccatcgcaacgcggttgaacatcgccgccatcatcaacgccgtacggccgtcggcagacgcggcatccaccggcgcgcccccttcgatcagcgccttgaccacgtccaggttgcccttgaacgctgcaccagccatcggcagctgattcttgtcgttggcgatctgcggatcggccttgaactccagcagcacttttaccgcctcggcgtggccgtggtaggccgcgagcatcagcagggtgtcgccgttatggttgcgaaagttggccggcaagcctttggccagcagcgcagcgagcatggcggcgtcgcctttacgggcaacgtcgaagacctgttcggcaaattcggcagcttcgtcttcggtcatttgtttggcttggtctgacatgtggggctccttgtctggtgctttatatggcgcccagtgtcgcgagggagttcccccctgtcatggcttttttgtcaaaagcggccataggcagaatcaatagcgctcctttaatagcggaaatgcccaccctggatctgcgccagcaactgcccggtgaccggcacataactgtccgaccccggcagccaggcatagaccgggtcattgccggccttgtccgggtcgaaggcttcctccttgagccgcaccttctggtatttgaaggtgccggtggtttccatcttcaccttgatccgcaggaacaacggcacggcatagtgcggcaactgaccatgagcgaactgcagcaactcgcgcatgtccagggcagccagcgattcgctcggggtgatggcgaccataccggcgcggccattggtgttttcgatttccacgccataggccacgacttcagcgatctgcgggtgttgcagcaggatgttttccacttcggtggtcgagacgttttctcccttccagcgataggtatcgcccaggcggtcgacaaactgtgcatggccgaagccgatgctgcgcaccaggtcgccggtattaaagtagcggtcgcccttctcgaacacatccgtgaggatcaccttgcggtttttctccgggtcggtgtaaccgtcatagggagacttttcatcgatcctggccagcaacaagccctgcccgccggtcttcactttgtgcatgaagccatcgctgccacggatcggctcaccgctgtcgtgggcgtagtccaccaacgcccagtgctgcaggcaaaagccgacggtgttgtcgaaattcaatatgttggtgaaaccgatattgccgtcgctggcggcgtacaactcgcagacatgctccacgccgtaacgcgccttgaactgtgcccacacaccggggcgcaggccattgccaaccatcttggtcacgcggtggtcacggtcgtttccggtggccggctgatcgagcagatagcggcacaattcgccgacataaccgagggtggtcgctttgaatttgcgcgcatcctcccagaactggctggcgctgaacttgcgccggatagcgaacccggacgcgccgacaatcgccgagccccagcagacgcagaggccggtggcgtgatacagcggcagggtgcaataaagaacatcctccggccccatgtccagcgcaatgctgccgaagctgaccgcggtcttggtccagcggccatgtttcatgatgccggccttgggcagcccggtggtgccggaggtatagatatagaagcaggggtcgttgaagaaaatctgcgcggtactcggcgggttgtccaccgggcatccggcgctggctgccatcaggtcacagtaaccgtcgggcagcgcattgacctgctggtccgcgacaaaccaggtccgttccacaggaatgctcacctgctcacgtaccgcgtcataagaagccactaattctgcaccggccacaatcgccaccgggttcaccaggttgaggctgtgcagcagcgccgcctgggtttgcgcggtattgagcatcgcgcagatgccgcccagcttggccacggccagtacgctcagcagcaactcgggacggttttcaataaagatcgccactacgtcgcccttgccgatgccttgggcttgcagatggtgggccatgcggttggcctgttggttggcttcgctgtagctgactacgcggtcgccgtacaacaaggccgtgccatgcgggttacgcagggtggcttgttcaaaatgccagcccaggccacagggctgcgcggggtcggtgacattggcggcccgcatgccgcgcaccacgcgtggcaaagcgcgaacaatggccggcaccttccgcagcatcatgccccaggtgatcatgtcgttttgcgcgtggctcatgggaacatcctttttcttattgtgcgtaaaccttgcagaaaagtacgtcaggccctcttcggctgtacacgcaggatttgaaaagttttgtatcccgataagcgagcgctgaaaaaaggaatttagccaggcagagggagtctttatgagtaatggcctgcatgctcgaccctgccaagcaacgcaaaatgcaggatgcatgatggccattcatgcaaattgcacgaattcgaaaatttagaatttttataaactattgatttataacgatatttatttaaatcactagctggcacaatcactgcacctatctctccatgcttgccaacttgagccaacggagctgatagacatgagcctgatccaagataaattcgcttcagtattctccaactacgatgtcaccacccagcctcgtccagatggcggcatcctgctgaccctgcgcaacagcgagggtaaacaggtcaagcgttcgatctcataccagcaattgcacactgccgaccagctgacatgggttatcagcgccattcgccgcgacctggcagaacaggccagcgagctgccgcagatttcgatgctgcaaagccagaaccgctttgccttgccgacctaccactcggcttaagctccagatacccaaaagggccgcgacgcctctagcgtcgcggccctttttcatgggttcaacacagcccttgtcggctggcttcgttgacggcctgtacccgattggtcacttccagcttgcagtagatattgcgcaggtggaacttcacggttgcttcggacgtggcgcgtatctggctgatctcccagacggtcttgccttccgaagcccagcgcaggatttccaactccgccggggtcagggccttgcccgctaggttcagacgtcgcctgattgcattgggcagcgaatacggcggtagatacgattccttggggccgctcattagatcctctcctttttctggctcatgccgcaccaccttcttcggattcctcctattgacaggtgacataaacattgatgccgcagagggttacataacgaatggtattaaggcgcaggcccgcgcataaacatccgggccttacagaagtttaagtttcttcccacagcaacttccaaccttcaggggttgtagtttttgataggtggggattagtcgtcgaggccggggaaacgactggcaatatcgtcctcggtgaactccggtatacattcttcagccgtactgcacaggcgcagcgtgacgaagtgcgggttctcacccatatcaatccagtgcgccataccggccgggatcaccagcaggtcgtttttctcacagcgcacggcgtatacgtaatcgcctatgtgcagggaaaacagcccctggccagcaatgatgaaccgcgcggtatcttcgctgtagcggcgctcagcaagaaaacccgcacgcacttcggccttctggagatgatcctccgtcaccttgagcacccgcgcatctgcgtagcccaaggcctgaatctgcgccttgtacgccgcaatcaattgcgcatctgtggcccccttctcgatggggacaggctgccaacgctcaaaacgcacgccgtgttcggccagggtcgcagcaatatcctcgtagtgggtgaggaccttgttcggggtgtccggtgaagcaacggagtagacggcgacatagctcattgaagggttccttggttctgctcgtgcaatcgaagaccgatgataagggcggcggccagggccgcgacgctcgcgatgctgaacgtcagggtcggccccaacaggttccagctgtagccggcatacagcgcacccagcgcaccgccggtaccggccagggcggcgtagagcgcctggccctggccttgttgccggtcaccaaaactgcgttgcacaaaggcaatcgaggccgcatgaaagctgccgaacgtggcggcgtgcatcacctgcgccagcaacagcacccagaaatactcggcaaacgaccctagcagcaaccagcgcagcgccgccaacaggaaactcgccagcagtacccgacgtaccgaaaagcgcgtgaggatgcggctcatgccgaggaacatcaacacttccgccacgacccccagggcccacagcatgccgatcacaccgcggctgtaacccaggtgttccaggtgcagcgtcagaaaggtgtaatacggaccgtggctcagttgcatcaatgccacgcaggcataaaacgccagcacgccggggctgcgcaattgcttgaggaagccgtcgcccaccagacgattgccgtgggtggtgggctgcgcattcggcacccacaggctggcgccgataatgcccgccatgatcaccacgaccaccaccgggtagatgtccaggctcagccagtcgaacaggcggcccatgatcaccacggtgaggataaacccgatggaaccccacaggcggatctggctgtagcgcgccgtctgcttttgcaggtgcgcaagggtgatcacttcaaactgcggcagtaccgcgtgccagaagaacgcatgcagcgccatgaccagggccagccaggcgtaggtgtggctgacgaagatcagcgaaaaactcgccagggtgcataccgcaccaaaacgcacgatggccaggcgccggccggtgtaatcgcccagccagccccacaggttgggcgccacgcagcgcatcagcatgggaatggccaccagctcgccgatgcgcgcgctggagaaccccaggtgatcgaagtacagcgccaggaacggcgcagtcgcccccaggagggcgaagtagaacaggtagaagctggagaggcgccagtatgggagagatgaggtcatgctagatggggctgcttcgcagcccagcgcgagcaagctcgctcaccacagtcacagctggcccagcaccggcgtactcacgcgcacatcggcgttttgcccgcgattgcgcaacaggtggtccatcaacacgatggccatcatcgcttcggcgatcggcgtggcgcggatgccgacgcacgggtcgtggcggcctttggtgatcacatccaccgggttgccgtgcacatcgatggaacggcccggcgtggtgatgctcgacgtggccttgagcgccaggtgcgccacgatcggctggcccgaggaaataccgccgaggatgccgcccgcgttgttgctgaggaaaccttgcggggtcagttcgtcgcggtgctcggtgccacgctgggacacacaggcaaaaccggcgccgatttcaacgcctttgaccgcgttgatgctcatcagcgcatgggcgagttccgcatccaggcggtcgaagatcggttcgcccaggcccggcttcacgccctcggccaccacggtgatcctggcgccgacggaatcctggtcgcggcgcaactggtccatataggcttccagttccggcaccttgtccgggtccgggctgaagaaggcgttgccctcgacgctgtcccaggtcttgaacgggatttcaatcgggcccagttggctcatgtagccacggatcacgatgccctgggtggccaggtatttcttggcgatggcaccggcggccacacgcatggcggtttcgcgggcagaactgcggccgccgccacggtagtcgcgctcgccgtatttgtggtggtaggtgtagtcggcgtgagccgggcggaacaggtccttgatcgccgagtagtccttggacttctggtcggtgttgcggatcagcaggccgatggagcagccggtggtgcggccttcgaacaccccggagaggatctcgacttcgtcgggctcctggcgctgggtggtgtggcggctggtgccgggcttgcggcggtcgaggtcacgctgcaggtcttccagggacagctcgaggcctggcgggcagccgtcgacaatggcgaccaacgccgggccatggctttcgcccgcggtggtgacagtgaacagcttgccgaaggtattgccggacatgcagggcgctccgtgaaatcagttgaatcaagtcaaccgtaataacttaaggcggccagtatacgcaggctaaccgagtagttcatcctcgaaaccttaccggtagaccttggtccaaccggcaccttcctcatgatggcgcgatgatgctgcgagttctgcttttgaccctcaccctgttttccagtgttggcttcgccgcctcccctgtcgtgctgcaaaggcccatcagcctggacaccggcagtggcgagctgtttggctcactcttgttgcccaaatccgataagccagtcccggttgtactgatcatccctggctccggccctaccgaccgcaacggcaacagtgccgacggcgcgcgcaacgacagtctcaagcgcctggcctgggtgctggcgcggcacaacattgccagcgtgcgctacgacaagcgcggcgtcgcggccagcctggcggccacgccggatgagcgcaacctgaccctggatgcctacgtggccgatgccgtggcctggggcaagctgctcaaggccgacacacgcctgggcccgttgattgtgctgggtcacagcgaaggtgccttggtcgcggctctcgccgcgccgcaactggacccggccggcgtcatttcgttgtccggcagcgcacgcccggtggaccaggtgatccgccagcagttggccgatcacctgccccctgccctgttgctgcgcagcaacgagatcctcgatcacctcaaggccggccaggtggatgctgatgtacccggcccgctggaaggcattttccgccccagtgtgcagccgtacctgatcagcctgttccgtgccgacccttcggccgcgttcgcccagttgcgcatgcccgcgctgatcatccagggcaccaacgatatccaggtgggtgtgggcgacgcccagcaattgaaaaaggccaagcccgacgcacagctggcggtgatcgaaggcatgaaccacgtgatgcgcatcgtgcccaacgacgtgaagcagcaattggcctcgtacaacgatccgcaactgccccttgccgccgagctgggcagccgcgtcgtgcgctttatcgacggacttcaaccccgttaagcgacaatttgtctccagtcctgggaaaaacggccgataagccctgggtcgacagcaaaaagactgtcggctcgctgggcttggacaggatcgcgccgcatgacaaccactgaagcaacaccggaatccaccgccgataccccggctgaaaaaaccgaggccgtcgacgcggcgcccttgccgtgggcggaggtccaggccgagcatttcaagatgctgcgcctggcgcccctggccaccgaccgcgccaccggcgtgcgaccgttgcgcttcgtgcagtttggctacgccgagcgcaatgacaaacaccacagcctgctgcgcatggtgatccagctgccagggcagcgcgtgcgccgtgagcagaaccacctggacatctgggtcgaccacgacaagcaccgcgtgcacttcggcccgggcaacagcctggaaatcgaaccggccaaccggggtatcggtcgcttcctggtggcccagggcgccgcgtgggcgaagaagaagtggtcacactaccgcgtcgacggcgtcgacctggccaacaaagatgcgttgaacgaggccacccgcctacgccgtgatcacttcctgcgcatccagggctttgatgtggcctacgccgatgtgcagcacctcaaaggtaatgtgcagccgggcaaggtcggcgatgtgctggacagttggaacaccgagaaggtgcagttcgtggagattctcgaagccgcgcagatgctgcaacaggccgagcagaacctggcggagcaggaagtgaaactgcgcaaggaagaggaaaaggtcaccaagttcaagcgtgaggacagcgggttgcgctttaccatcacctgcctggtggcgtttacagtgtttcaggcggggttgttgatctggattgccacccaccgctgaaatgagtctatgccttgaaataaggtctgaatgtgggagggggcttgcccccgatagctgagtgtcagtatttggagtagctgactgatccaccgccatcgggggcaagccccctcccacattggccctattcgttcagtaaggtgggttaaacgcgggcggcaaacaccgcctgatgttgacggcattgctcagccgtcaacatgaacaccccatgcccaccgcgctggaagtccagccaggcgaagtccacttccgggtacaacgcctcgacgtgcacctggctgttgcccacttccacgatcagcaagcccttctcggtcaagtggtctgccgcttcggccagcatgcgccgtaccaggttcaagccatcgtcaccacaggccaggcccagcgccggttcgtgttggtactcatccggcatgtcggcgaaatcttcggcatccacatacggcgggttcgacacgatcaggtcaaaacgctggcccggcaggccgtcgaaaccgtcaccctgcacggtgtagacgcgctcatcgacgccatggcgctcgatattctggttggccacttccaaggcttcaaaggacaggtcgcccagcaccacttcggcgtcctgaaactcgtaggcgcaggcaataccgatgcagccggagccggtgcacaggtcgaggatgcgggcggggggctgggccagccagggttcgaagcggttttcgatcagctcgccaatcggcgaacgcgggatcagcacgcgctcgtcgacaatgaacgacatgccgcagaaccacgcctcattcaataggtacgcggtgggtacgcgctcatggatgcgccgatgcagcaaacgttgcacatgggagacttcctcttcctccagattgcagtctagataactgtcggcaatttcccatggcaggttcaaggcgccgagcactaattggcgggcttcgtcccaggcattgtcggtgccatgcccgaaaaacaggtcttccccatggaaacggctgacagcccaacgaatatggtcgcgcaacgtgcgcaggcgggatgtgatcacggggacaagctcctggaaaaaacgactggcgattctaacagccttcacctgtaccgacgatgtacgaaaacctgcgcccatccgtcggatttcatccaaattgccatcattgcgttaaacaggcccacctcttgacatggctgcacgtcaacaacggcgtaccttacgatggtagcgattcacagaaccgctcagccagtggacaatgtcgcaaaagcccccctcacaggagccccagaatgtccgttccaaagacgatgtttcaactcagcggtcgtggttacgcagcagcgaacctcagccatgcgaccctcgtgatcatcgacgcccagaaggaatacctcagcggcccgctcgccctctcgggcatggacgcggccgttggtaacatcaagcaactggtcgccgcagcgcgcaacgccgggcgcccgatcgtccatgtgcgtcacctgggcaccgttggcggcttgttcgaccctcaaggcgaacggggtgagttcatcccgggcctcgagcctgagggcgacgaaaccatcatcggcaaactgctgcccagcgcatttcacggcaccggcctggaaaaacacctgcaggacctcggttccctggatctgattgtctgcggtttcatgagccactccagcgtcagcaccaccgtgcgtgccgccaagaacctgggctttcgctgcaccctggtggaagacgcctgcgccacccgcgacctgccttacaaaggcggcatcctcagcgccgagcacgtacagcagaccgaaatggccatcatggccgacaacttcgccaccctggcgttgaccaaagatctgatctgatcgaccttctgatgagcggtgcggcaatttttattgccccgctcatccgcaaagccttttcatttggcgcatttacccctcgtcccggaacaacctgtgtattgtccggtcgaagggccgataccctggaggaaaggtcggaatgaagatatccgatggttttgatgctcgtcgcttgcgccccaagggcccgagcaactggcgtctgcgcctggtggccggcatcgccgcgctgctggcgatcgtaggtctgctgttggccggcgctggtggtgccggtctgtctggtcactcgccggcccttggcgagctgaatgccagccctggtggctcggctatcctgctggggatcgggctgctggtactgtggctgggcgtatggttgtggcggcgcagccgtcggaaaatgcgccagccgttgtcgcttaatatcgcttcgcacctgatgaaaaaacacgactgatggcgcttggatagcgtttcctgcgccccggccgccgcgatttaggtaaactgcccgcccttcgcggaggctgacatgcaagacgacgatttttccctgttcaaaaacgagctgcgcggcgtcaagccgatcaagcacgaccgcgccgacaccggcaaacccaaggccgaccgcgcgcagatcgccaagctgcgccaggccgcgaccgtgcgaaccgatgccaccaccgtggacggcctgtcggaccagttcgtgatcgacgtcggccccgaagacgagctgatgtgggcccgcgacggtgtgcaggaaagccagatgcgcaagctcaagatcggccagatcccgttcgaaggcagcctcgacctgcacggcatgaccgtggaaaaagcccgggagaccctgtgggcctttctcgccgaagccaccaagttcgaaatccgctgcgtgcgcgtcacccatggcaaggccgtgcggctggacggcaagcggccgatgatcaagagccacgtcaacacctggctgcgccagcatgcccaggtactcggctttacctcgtgccaggctcgtcacggcggcgcgggggcggtgtatgtgatgctcaagcggaccatgatggaagggcgcgacgaataacaagtgccatcgtcaggcttgcagcgatgtgcccgccaccgtaaccttgcgctttgcgaaaatcccacaggtagtttcatgtccctggaacagaattacaccgcgatcctcggccaactcggcgaggacgtttcccgcgagggcctgctcgacacgccaaagcgtgccgccaaggcgatgcagtacctctgccgcggctatgagcagacactggaagaagtcaccaacggtgccttgttcagctccgacaacagcgaaatggtgctggtcaaggacatcgagttgtactcgctgtgcgaacaccacctgctgccgttcatcggcaaggcccatgtcgcgtatatcccgagcggcaaagtgctgggcctgtccaaggtcgcgcggattgtcgacatgtatgcgcgccgcctgcagatccaggagaacctcagccgccagatcgccgatgcggtgatgcaagtcaccggcgccctgggcgtggccgtggtgatcgaggccaagcacatgtgcatgatgatgcgtggcgtggagaaacagaattcttcgatgatcacttcggtgatgctgggtgagttccgcgaaaacgcggcgacccgcagcgaattcctcagcctgatcaagtaacaggctgcgtaggaaaagaccggcgctcatcgccggttttttttcgcccgcagaattcaggtaagctgccgcccctcagttatgggcaagaggtttacaccatgttggtcaaagcacttcgagtcggcctcggccagatcatcatcgcgggcgacttcctgacccgtccccgcaaaaaacagcgccccgccgaacagcaggcgcaggtgaatgcagcggccaaggaactgaccctgtatcagttccacgcctgcccgttctgcgtgaagacccgtcgcaccctgcgccgcctgaatgtgccggtggcgttgaaggacgcgaagaacaacgcgcaggaccgccagaccctgctggagcaaggcggcaagatcaaagtgccgtgcctgcgtattgaagagaatggccagaccacctggatgtatgactccaaggtgatcatcgactacctcgacaagcgtttcgctgcggtctgacagacactggataaccaatgtgggagtgggcttgcccactcccacatttagttcagtattggcaaatcaatgtccagcagcgcggagcccaggcacttgccatgggcatccagcgccagcgagcgggtgacaccaccacgcagaatgcccggcagaacgaagttcagtgcctgcacattcgccagctcatagcgccgcaccggtgcggcgcctggctccagttggtcgacaaagaacgcggccacgcgctcaaccgtcagctgtgcgcagagcaatgggtaatcctcggcacgataggcaatgatcgaaatgttcgacgtgtcgcccttatccccggtacgggaatgggccagtgtgtgcagcttcatgcttcgatcctcggtttgaccgcatcacgcggcagcagcaacgacgccaccgccaccacctgccgcacgctcttgctcgcgccgccgccaccagacgggccgttggtgtaaagggtttccacttcgttgccgacgcgcaccgcttcgctgcgctcttcacaacgagccgccacgcgcaggcgcacttcccagggctccaccgtgctgcgcgggccgtgcagcgagtccatgccgatcaattcggcacgcacgtcctgcatcttcacccccatcaactcaaggcgcttgagcacgacatcccgcgccagctgtgcccgagcgacagcaccagggccaccgtaggacatctgcccttcaccgatccatccgtccagatagccaacactcaccttcaactgtgcgggacgcgagcgccccccagcaccttgggcacgaacgcgatccgcgccctcctcgacaaagcccacctgggaaaagtcggctgtaacatccggcgtcagataggccgcagggtcatgcacttcgtagatcagttgctcggtgcaggtggcacagctgacccgaccaccggagccggtgaccttggtgatcacggcttcaccgtcggcatcaatctcggccagcgggaaacccaggcgcgccaggtcatccacatccttgaaacccggatcggcaaaatacccaccgctgacttgcccggcacattcgagcagatgccccaccaaggtgccgcgccccaggcgcagccaatcgtccgctgcccagccgaactcaaacatctgcggtgccaggaacagcgaggggtcggccacgcgcccggtgatcaccacgtccgcatcggcgtgcaatgcctgcagaatgccgtcgacgcccaggtaggcattcgctgagatcaaccgttcacccaaagagccgacggtctggccgttatccagcaaaaactcgggctgcaacatcgtcaacacgtcgtcgcccaccacagcgagtaccttgagatccaggcccaactcaacagcaattcgccgcacttcggccgccgccgagactggattggccgcgcccatattggtgatcacccgcaggcgacggcgcccggtctgcacacccacaaacggcagcacccggcgcatgcgctcactcaacagcggatcgtaaccgccttgcggatcgctgatacgcgcctgttgcgccaaagcgatggtgcgttcagccaggcattcgaataccaggtaatccaggtcgccgtgttcggccaactcgaccgcaggttcgatacggtcgccggaatagccggcaccggaaccgatgcgcaaggttttcatctcaaatcactcccaggagcaacgcggtcagggtcatcaacaccgacgcggcaaacagaaacggaatggtgaagcgctggtgatcggccagttcgatcttgcacaggcccaccaacaggaaggtcgcaggggtcagtgggctgaccgggaaaccggtggtgtgcacccccagcaacgaggcctgggccacttgcagcgggtcgacgcccagggccttgccgacttcagcgatcaccggcatcacgccgaaatagtaggaatcggggtcgaacagcatgcttaacggcatggaaataaaacccaccaccgccggaatcaacttgccgtgacccgccggaatctgcgccaccgccacttcggcgatggccttgagcatgccggtgccttgcatgatcccggtgaacaccccggcggccaacaggatactggccatggtcagggcggtcttggcatgggcatcgatgcgggcacgctgggcatccacgttcgggtagttgatgcacaacgccactacggtgccgagcatgaacatcaccaccgggtcgacccagccggcaatcatcaccaccatcaccagcacggtgaggatcaggttgacccagaacaggcgcgggcgacgcagcttgatgtcgtcgtcgctgagcacccgttgcggcaccgcatccaccgtggagccggcgccgagacccaggcgtttttcttcgcgacggcccagccaccaggcacaggcaaacacgaagatcaggccgacgatctgcaccgggatcagcggctggaacaggtccgccaccggcacgtgcagggccgctgacgagcgcagcaccggcccggtccacggcaggaagttgacaccggcggccatcgcacagacgcaggcgaggatgcgtttatcgatgcccagccgcgtatacagcggcaacatcgccggcaccgtcaccaggaacgtcaccgcgccggagccgtccaggtgcaccaacagcgcaagggtcgcggtgcctacaacaatgcgtgtaggacgcgtccctaccgtgcgcaggatgcgatcaataatggggtcaagcatgccggcatcggtcatgatcccgaaaaacagaatcgcaaagacgaacatgccgaccacgggggcgacgttcttgatcccggtgatgatgaaggcgctggtttgcaggccgaacccgccgagcagtgcggcaatgatcggcaaggcgatcagggccaccagcggcgagagacgtttgctcatgacggcagcgagcaggcacaggatggtgatgacacccagggtagcgagcatgggttactccagagcggcctttttggccggttattgttttccctggagtattggaagcaggttagtctttgtaaattggaatattcacccgctagtgttcggaaaaacaaaatgaagaacagtatccaacacattcaggcgtttctggcggtggcacgtactggcagcttcaccaaggcggccaatgagctgcatctgtcgccttctgcgctgacggtgcaggtgcaacaactggaagactggctcggcgtcgccttgctcgaccgcagcccgcgccacgtcagcgtcaccgtcgccggccaggaggcccgcgggccgatggaaaaactgttgctggacctggacaacatcgtcagcgggtcccgcgacctggcggcgttgcgccgaggcgtggtgaccatcgccgccctgccctcggtctgtgccggcagcctgccgccggtgctgcgcctgtttcgcgagcgttttgcaggaatcgaagtgcgcctgcatgacctggtcgcccatcgcattcatgcccaggtgcgttccggtgaggtggatttcggcattggcgtgcgcgcacggctcagccatgggctggaattcgtgccggtgctgaacgatcgcctgtgtgcgttcgtaccggtggatcaccccctcacccgccatcgcaaactgaccctggaacaactggcggaccagccgatcatcctcactggccgcgacagcagcgtgcgtgagcaagtggatgcgcttttcgatgagacacgcctgacgatgaacgcgggcatggaagccaactacatgtcgacggtattggcgctggtgcgccaggggctggggatcagtgtgctgccggaatcggcggcggacagcctggcggggttgaaacgcatccccatcgatcatcccggggtgaaccgcgagatcgggttgatcagtcgcagcgggatgggcctaagccctgctgcacagcgttgtttcgacttgctgaacgaacaactgaatgtgggaggggcttgcccccgatagcagagtgtcaatcacacataagttgactgatacaccgcaatcgggggcaagccccctcccacacgtttaaccgagcataggcacatgcttgggatggctggccacacgctgcaaccacgcctgcaccgccggataagcctccagctcaaaaccaccctcattcgccacatgggtataggcatacaaggccacatccgcgatggagaactgctcgcccaccaggtacggcgtcagttgcagttggcgttccatgaccttgagcgccttgtaaccgcctttgtgcagcttcttgtattcctccaggcggtcttcgggcaggcccaggtaaaactggataaaccgcgccaccgcaatgtacggctcatggctgtactgctcgaagaactgccactgcaacacctgggtgcgcagacgcggttcgctgggcaggaactcgctgccatcggcgaggaagttgaggatcgcgttggattcccacaggcaggtgccgtcttccagctccagcacggggatcttgccgttggggttcttcgccaggaactcggcggtctgggtgtcacccttgaggatgtccacatcgatccattggtagggaatgcccagcaggctgagcatcaatttgaccttgtagcagttgcccgacttgtaatcgccataaaccttgtacatggggctccccttatgccgcttgcgcgtgctgtgcttgacggaccaccgcggccaggcgcttgagaccttcatccaaacgggccgggtcgatatggctgaaattgagccgcaacgagccaagatgttggtccggctcggaaaagaacggttcaccgggcatgaacgcaacgttctggtcgagcgcttgagccaacaaggtgcgggtgtcgagcggctgtttcaaggtcagccagaagaataatccgccctggggcacctgccagtcggccagctcggcgaattgacgctccagcgccgactggaaggcatcgcggcgctcgcgataaaagctgcgcagttgcgccaggtgctgctggtatttttccgtgccgatccactgcatcgcctgccattggccgacgcggttggtgtgcaggtccgccgattgcttgagcttgagcaggtgcgggaacaggtccgggctggcgatcagatagcccacgcgcaggcccggcaacagggtcttggacacggtgccggtgtagatccagctggcttttttcaggcgcccgacgatgggtttggcgctgccgccgtcgaaggtcagttcgcggtagggttcgtcttcgatcagggtcacgccgaattcgtcgagcaaggcggcgacggcttcgcgcttggcctcgctgtagcgcacggccgaggggttctggaacgttgggatcaagtagatgaaggccgggcgatggcgctcaagattggcacgcaacgcgttcaggtccggaccatcggcttccagttgcacggtgaggcaatcggcgccgaacagttggaagatctgcaacgcggccaggtaggtaggcccttccaacaggatctgcgtgcccttgtcgatgtacagcttggccgccaggtccagggtttgttgggaaccgctgaccaccaacacctggctggcctggcacggtacacccagggcacgcgcctcggcggcgagcagttcgcgcagctgcggttcgccttcgctcatgccgtattggccgatgttcagcggcatgtcgtcccagttcaaggcaggcaacatggcttcggccggcaggcctccggcgaacgacatcacttccggacgctgggccgccgcgaggatttcacggatcagggagcttttgaggcgcgtaacacgttcagagaaggccatggggtcaccggtagcgaagactgtgggaaatacgtcaaactggttgaccgaaattacgacgactcgcacggatacgtcaatatgcttgaccttaaaaaccccaccgcccagcaggccgccatggaagcgttcttcttcggctaccaagcgtttaccgccaaggccgacgaaatgctcgagcgccgtgggctgagccgggtgcaccagcgcattgtgtttttcatcgcgcgctacccggcgttgagcgtgaaggaactgctggagttgctcggtgtgagcaagcaggcattgaacatcccgctgcggcaattgcaggagatgcacctggtcaacagcgtcgcgtccgagacagacaagcgcaaacgcctgctggagttgaccgaagaaggcctgcgtttcgaacagtcactgcgccgcgaacaggtgaaattgctgcaacgtgccttcagtgacgcgggcgaagacgcggtagttggatggctggcggtgaatcaggcgctcgccaatcaaccctgatgcggtggtgacgctcctggggccgctacgcgccccaacgcggggcaagcccactcaccacgcaatcgtatggttgcctttcatctatttcgtgcagcaaatagaaaacattatttgctttatttgtatacaaaagcataattcgcttcgtgcgagttcctgacctattggtcaacaaacccgccagtacctctcagcgcttcggcgctgaccataacaataaaatgcttgaggagtactcgctgtggatagccgcaaatccgaagcctcgacgctggaccttgccccctcaccgaacggctggctggaacgcctgttcaaactgcgcttgcatggcaccacagtgaagaccgagctgatcgccggcctcaccaccttcatcaccatggcctacatcatcttcgtcaaccccaacatcatggccgatgcgggcatcgatcacggtgcggcgttcgtcgccacctgcatcgccgccgcactcggttgcctgttgatgggcctgtacgccaactggccggtgggcctggcgccaggcatgggtttgaatgcatttttcacctacaccgtggtcggcaccatgggctacacctggcagaccgcgctcggcgccgtgtttatctccggcgtgctgttcatgtttctgactctgtcgcgggtacgtgaatggctgctcaacagcatccccgtgagcctgcgccacgccatgggggccggcgtcggcctgttcctcggggtgatcggcctgaagaccgccggcatcatcgtcgaaagcccggcgaccttgatcaagctcggttcgctgcatgagccggcgccattgctggcggcggtgtgcttcctgctgatcgccatcctcagctaccaccgtgtgtttggtgcgatcctgatcagcatcatcgccgtgacactggccggctggggcctggggctggtgcactacaacggttttatctccacaccgccgagcctggcgccgacctggatggcgatggatgtggcaggtgtattcaatatcagcatgatcagcgtggtatttgcttttctttttgtacacatgttcgacaccgcaggtacactgatgggcgtcgcgcaacgagccgggctagtcaatgccgatggcaagatcgacaacctgtcccgcgcattgaaggccgacagtgcctccagcgtgttcggtgccatggtcggcgtgccgccggtgaccagctacgtggaaagtgctgcgggcgtagccgcaggtggccgtaccgggttgaccgccgtgaccgtcggcgtgctgtttgtggccgcgatgttttttgcaccgctggccgggatgattccagcctatgccaccgcgggtgcgctgatttacgtggcaatgctgatgatggcgagcatggcccatatcaattgggatgaagccaccgacagcatcccggcgattgtcaccgcgatcatgatgccgctgacattctcggtcgccgatgggattgccctggggtttatcacctacgtggcgctcaaggccggtacgggcaagtaccgcgagatttccgtcagcctgtgggtgctgtgcgcgattttcatcgcgaaattcatatttctataagaggtgttaggcatgagtctggaaacctggttgttgttcagtggcgcggcattggtggtgatcctgatccccgggccgctgtcgttgttgatgatcagcaacagcctcaactatggcttgcgccgctcctaccccgcatttctcggtggcgtaagcgcctcgatctgcctgctcagcgcttcggcgctcggcctgggtgccctgctgctggcctcggaacacctattcagcgcgctgaagatcgtcggcgcgttgtacctgttttacctcgcctggcagagttggcagcagtcgcgccagccaagccagggcgccgacgttccacaggccgcgccgaccccacgctttcgcgccttgttcgggcgggcgtttgtgctgggcgccagcaaccccaaggacatcctgttctttgccgcgttcctgccgcagtttctcaacagccagcagccgttcctggcgcagttgctgatcatgatcgccacctggaccgtgctcgacctgctgtgcaagctggcctacggcttgagtgcccacggcgctgcgcgctacctgcgcagtggcaagggccagggctggttcaaccggatcagcgccgggctgttcggtggcgcaggcgcgctgtcgttgctcaagagctgaccccgccgaacttgacgaaaaacaccgtcgggttggaacgcgatgtccactggataccggcaatgatcttgaccaggcggttctgattcaatgcccgactgatctcgggcatatgctccgaataggtacgcgccacactgcgccgcctgaaccattcgtcagtcaattgcacgctggtggcggaccgcaggttaacggtgctgttcttcacccagcgcgtgagcacgtagtacctggcgttggatttggggtgcgtgcagaagtaatccaccgagtactgcccgcccatgcgtttttcgatcgagtggatgacaaacccttgttgttccagcatccgggcaatcaccgcctgcaccacctgggccctggcactggcgttttcgcgggtgctcacgcgcaaggagggatcaaggggcgctggcagggtgaagtccatgcgcgtaaaccccggtgaacggccttcatagccaatgtagaaagccaggcgccgtcggctgtaggtcggacgcaacattttcagcaggtcatcggtgtggcccacggcaccgggggcgagccagtcatccagggtggcgcggagggtcaacagatggctggcggtcacctcacggccggtgtcggccaactcaatcaagcgctcacaggcggagcgccggctgagttccctcatgcggggaaacactcggcccatggtgttttccagcggctccaggaacagcaccggccgcgccttccagaggccatcggcgcccagcgtcgcaggaatcggctgctcactgaagccggcgcccaaccagaagtgaatgtcggtggccgcttgcggagccagcgcccgattacgggtgagaaagataatgctctggaacgacgaattggtcccctcgggcagcaaccggaacaaacgcccgtcttggcgcagcacatcgaaggcccgctccccctccccgcccgacacgcggaagatcccgcgctcgggcaacaggtctgtcagcacccatcgcgaatcgaacgcccacccctgccccgcaccgggcagatgggcggcgcggcccacgtgttcctgcagcatcgcatgagaaggcggcgaccactcctgggcgctgggggttgtagcccacggccgccacatctcggtactgggtcccggctgcggctggggtggcggggcatcggcgccaagcagccattccccgggttcctcgatgtgcagaatcagctcgttttgcacatcgtcctgcgggtgcttgagacgcagcacctgttcatcctggcgtcgatagaccgggtattgatgggtatcgtcgagcacaaattgctcgccacccttgacgtaagtgccccgattacccggcccctgcaactcgatggctgcgcttggcggcaggtccttgcgaaaccgttccagcgccttggccggcagggtcgtcgacggtttgagcgcagacagcccgccgccgaccaacccatgacgacggtgcagccggcccagggcaccgcgcatcgacgcgcgcgcggcggccacgcctgtcacccgcgcaccttttggcccgggaatgaacgcggtcagcacatccacaaagcccagcagcgtgacaaacaccaagtcaacggcgtcactgggatggcggctgtgatgaaagcgcctggccgccaacagaatctcgtaaaggctgacccccaggccgatcaccggtacgaacgacagcaacccacgcagcgtagccgcgtgttgctcgcccaagcgatcttgccggtaggcctccaatgttctggccgatacggcgcgcccctgtgcgcggtgctggatttcgagcatccgcgcgtgcgccaacagtgccaacgtatgactggcgggggttgcactgaagtcgagccaggcgttcggggcggcggcgatctgctcgttgatctgcgcctggatatcctccacggccaccgacggcacgcggtgcttgaccttgaacgagcgtatgaaccgggcgatggcctcgaccgtttccagcacatagaacccacgcaccggagcaaacaccagtctggttccaccggtagccaccatcgcccccccgctgccgacgacggggtaactggcgatggcctgcgtctcccaccccggtgccacctgatgggccagggctttcacattggccggggtcgcccaagcctggttcaaagcggcgacagcctgctcccggctcgtgtactcggcgatggccgggccatccactgcggcaggccagtacaccagccacaaccctgtggcttcgtcgtgggtcaccagcaccccggcgatatgccggtcgtgttccagggtatgcccgcacaggcgcacgaagtgcaatcgcaggcgatggccgttgccgttcagatcggccaccgcctgcgccgccatcagggtgttgaacacactctgggccttggcactcaggccctgccttgccgccgaaaacccatgcatacgcgcctgctggcgcagtacccggtcaatcagtccaccaggcaacgttgggggcgcgcaagcgggcggataaaacacttgctggatcaacgtgtcatagcgcccgccgatatccagggctgccagggtcttgatcaagtaacggctattcaagcgctgctgccactgcggcgccaggtagcgcgcgcggttcaagcgccactcggtccagggcgcctgggcatccagattgtgcagggccaactgcaacaggctgaatgtagtgcgttgcggactgacgactttcttgatatcccgctcgcccaccccgcactggctggtccacccgcagaagtaggcgctgacgtcatcgggcatatcgagcaagggctgatcgatatccacctccgggtacaacccatccagcttcaattgagcgatcagcagcttacgtgcgaacgcctccaactccggcaattcacgccagagcttggcttcgaatgcctgggcactgctcaagtaatgcagctgtaatcgtcggtaggcattgcgctgatcggcctgcgcctggcccagccatgccggcagtttattcgcctgggcggcggcgaaccgcagcagctccaggttggccatggcctcggtcaaggcgtcatgcgccggcacctgtaggtgctcgcgcatctcggcggccaacagcatccggatcagcgcccggtcgcggacttcactgaaaagccgcaagccctggtccagtccctggtcgagcctggcgtagtggttgatcagttcagtgagcccatggtgcagcacatgttcctcaagcacttcgtacgtcaccgtgatgtcagacgcagtcttcagcgcctggcgccgatcacgccccacgcactgccagaggggcgagccgtcgcgactgcacaggctaacccgcaggcgctcggatagcgtctccaggtcgtcgaatgcagccagcccgccgaagcgcccggccacacacagcagcactggctgcgtccgcaccggggtggcgtgggcctgtttagtcgtcactacgaacgcccccagcatcccctcgccgcccaacagcacccgcagcacgcaggtatcgctgccgttgcgatcgctggcatggggcttgttcaacacttcgaccaggcgctgcaagggcgcctcggccatcagtttcaaatgctgcagccgttgcacctcctgcaacaacgcctcgcgctgggcgatcaacaacaaggtggtacggttgcgcgtgtcgtctgggtgttccagccagaatgccgggctcagcaggcgctcatctgccccgagtgacagggcctgcaccgcatcagtctgtgcttgccattgcccattgagcgtgaccaatgcgtcataggccgtgctctcccggctcgggtcctgtgggtcgagcagcgtcatgaggcgcttttcgtagcgctccacctgctgttcgcggctgcgcaaggccagtccggacggcagctggccgaggatgatttctgccgcacgccgcgttgcatcccaacccaacaaggtccccagggaagcgcccaggtgctccgcgatcgccagtcggtcccggcctttttcgataaaccgcaggaagcgcgccgtgtcacgccccagtgaagccggcgccgctaacgtcgcgtgattgatcgacaacgcgcacgccagctcgttgtcccattgcgcatcaagcacggcgattgcactgtgctgcaaggcatcgccgctcagcgcagcgccacgcgccaactgcgtctcgccgcgacagacttcgtggcgacggcgtagcggcaagcactgccacaagacactgaacaacgcgccgttcaacaggctcgccaaaccgcgttgcacctgttcccaagcactgaactcatagaatgcgcgggccatccctggcagatagatcacgtggggcgcctgctgcgccgcgccctcacggtacaagtgcagggcgccgggaatggccagcgccgtctgaaacgtgccgggccacagtactgtgccgacgcgcacgccagcccaatcgccgccagcgcgctggcgtgcctcttcggaaggcgcatccgccaactgctgcaccaacgcccaacccgcatccgacagttcatccaactggtgcgccaggaagcccgcgtcgatgaacaaacgcttgcgcaattgcacccaacgcgcctggcgcgtcaaccacgagccgtacgccaaatactgccagtattcacgtacctggttgtcgagccgagccatcaaccccagccccttgacccgctccagcgcctgccgggcggtaaaaggcagtttgcgcgcagggtcgtccttgaggctcagcgcggtatactggttaaggttgatcggcaaggacggatcgctgaacaacgccagcgcgcgctcggtcagactgtcgactttctgcgcgggacgtggcggcaggggctcggtgaacagcagggtgtccggatccaggccaaaggcttcctgcaacgcgaaacgaatcacccgcaacagccgtggcgccctgcctatcagacgcttgagcgcctttgaggattcgatacagcgcgtgttcacgaggtgccattggttgatcagccggctgggttgggcggatgcgttgaggcggcgcgtcagcaagcggcgaacggcttgatcacgggcctcactggcctgaatgggattgtcgagatcaaagggttcggcggtgacagtgtccggtgccgagactacggggttgaggggatcagagctcatgacggcgtcttcttgtacgaaagacgccgagcctaggcctcatccctctaaggtgtgcgccacataattgaacgggcgggcgggcaaatgccaggcaaaaaaaagcccgcagtgtgcgcgggcgaaaccaacgaagagctttgggggtgtgaagcgaggtgacgctcagctaccgcgataggtggagtagctgtagggcgaaatcagtagcgggacatggtagtgatcctgctcggcgctgatgccgaagcgcagcaccaccacatcaaggaaggccggctccggcagttgcacgccgcgggcgcgatagtaatcaccggcgctgaactgcaattggtacacgccgctgcggtagtcgtcaccttgcaacagcggtgcgtcgcagcggccgtcgctgttggtctgcgcggtggccaccagttccagctgcacgccttcgacgcggtacagctcaaccttgattgcgctgccggggcagccgtgtgcggcgtccaatacgtgtgtggtcaagcgtcccatggcgtctgcgcgcctcctgtggtcagtagaaaagtgatccgcactttttcagggcatcgaaaaagccggtgatgatcgattaagacactttttaaaaaaattgtacacaataaaaatcacaaactctcagatcagcctactgccattgctcaacagggcaatctgcgcgttatccttgcttttaaaagaccttttgtccattagctgaccaaccaggcaagtttcttgctacacctctggtctagcgctacgccgaaaaaatgcagaaatgtaggcttacaaagtgcgcgataagttgtatacaatcactcatcgctactacgacgaacaagaaggaagactgcagtgagcgctgactacccacgcgacctgatcggttacggcagtaaccctcctcacccccactggccgggcaaggcgcgcattgcgctgtctttcgtactcaattacgaagaaggcggcgagcgcaatatcctgcacggcgacaaagaatccgaagcgttcctttcggaaatggtctcggcccagccgctgcaaggcgcgcgcaacatgagcatggagtcgctgtacgaatacggcagccgtgccggcgtgtggcgcatcctcaagctgttcaaggaattcgacatcccgctgaccatcttcgccgtggccatggccgcacaacgccatccggatgtgatccgcgccatggtcgacgccggccatgagatctgcagccacggctaccgctggatcgactaccaatatatggacgaggcccaggagcgcgagcacatgctcgaagccatccgcatcctcaccgaacttaccggcgaacgccccctgggctggtacaccgggcgcaccggccccaacacccggcggctggtgatggaggaaggcggcttcctctatgactgcgacacctacgacgacgacttgccctactgggaacccaacaaccccaccggcaagccgcacctggtgatcccctacaccctggacaccaatgacatgcgcttcacccaggttcagggtttcaacaagggcgatgactttttcgagtacctcaaagacgccttcgacgtgctctacgccgaaggggccgaggcgccgaaaatgctttccatcggcctgcactgccgcctgatcggccgcccggcgcgcctggcgtcgctgaagcgctttatcgaatacgtcaaaggccatgagcaggtgtggttcactcgccgcgtcgacattgcccgccactggcaggaaacccacccctacacgggagcggccaaatgactgcgttccacagcctgaaaccctcaaccctgagccgcgatgcgtttgtcgccgccttcgccgatatctacgaacactcgccatgggtggccgaaaaggccttcgatctgggccaggacacttcgatcgaccagatcgaaaccctgcaccagcgcatgagcgacatcctgttgagcgctgatcatgcccgccaactggcgctgatcaacgctcacccggacctggccggcaaagccgccgtccagggccaactgacccaagccagcaccgatgaacaagctggcgcggggattcaccaatgcacggccgaagagttctcgcgcttcaccgagctgaacgacgcctacaaggccaagttcaagtttcccttcatcatggcggtaaaaggcagcaaccggcaccagatcctcgccgcgttcgaaacgcgcatccataactcggtggacaccgagttcaagtgcgcgctggacgagatcaacaagatcgcgttgttccgtttactgaccctctaaacgaccatccccagccactctattcaaggcagacaagaagaatgaaagcttacgccgtacctttcgagaagttcgtcaacctggccgacgcccgcctgggcaccaagatcatctctgttaccgatgactggttcgccgacgccaaccgcctgttccagccgaccccggccgtgtggaaggagggcgttttcgatgacaacggcaagtggatggacggctgggagtcgcgccgcaagcgcttcgaaggctacgacagcgcggtgatccgcctgggcgtgccgggctcgatcaaaggtgtggacatcgacacttcattcttcaccggcaacttcccgccatcggcttccctggaagcctgcttcctggcttcgggcgagccggatgacaacacccagtgggtcgaagtgctgtccgccgtcgagttgcaaggcaacagccaccactaccacgagatcaacaacgaccaggccttcagccacctgcgcttcaacatctacccggacggcggcgtggcgcgcctgcgcgtatacggcgtgccgttccgcgactggtcctcggtgggcgacaacgaacaggtcgacctggcggccgcactcaacggtggccgtgccctggcctgctccgatgaacacttcggccgcatgagcaacatcctcaacccaggccgtggcatcaacatgggcgacggctgggaaaccgcgcgtcgtcgcacgccaggcaatgactgggtaatcgtggcgctgggtcacccgggcgagatcgagaagatcatcgtcgacaccttgcacttcaagggcaactacccggacacctgctcgatccagggcgcgttcgtcaagggcggcaccgacagccagatcgaaacccaatcgctgttctggcgcgaactgctgccggcgcagaagctggaaatgcacgccgaacataccttcgccgagcagatcaaggcgctggggccgattacccacatccgcctgaacgtgttcccggatgggggtgtgagccgcctgcgtgtattgggcaaagtagccaagtaagcggtgaacccgatcgcaggcaagccagctcccacatttgactgtattcacaaatcaaaatgtgggagcgggcttgcccgcgatggcggcagaacaaaccacacaaaattcggataagaagacagccatgcgcacactagtgatcgaacccctgaccaaagaagccttcgcccctttcggagacgttatcgaaaccgatggcagcgatcacttcatgatcaacaacgggtcgaccatgcgctttcacaaactggcaacggtggaaaccgcaacgccggaggacaacgcgatcatcagcatcttccgcgccgatgcgcaggacatgccgctgaccgtgtgcatgctggaacgacacccgctgggcagccaggctttcattccgctgctcggcaacccctttctgatcgtggtcgcgccacttggcgatgcacctgtatcgggcttggtccgcgccttcgtcaccaacggcaggcagggcattaattaccatcgcggcgtctggcaccacccggtgctgacgatcgaaaagcgggatgacttcctggtggttgatcgcagtggcacaggcaataactgcgatgagcattttttcaaagaggatgagcggttgatcctcgccccccaccaataagagaaggtctgatcacccgacaacaagggtgacaggcgagaggtaaagactgtggaagcacatttgatggaatggctgaacctgagcgtgcgctgggttcacatgatcacgggcgtcgcgtggatcggcgcttctttctacttcgtctggctggaaaacaacctcaatcgcgtcaaccccaagagcggcctggccggtgacttgtgggcgatccacggtggcggtatctaccacctggaaaaatacaaactggccccgccgaccatgccggacaacctgcactggttcaaatgggaagcctatttcacctggatgtcgggcatcgcgctgctatgcgtggtgttctactggaacccgaccttgtacctgctggccccggacagcagcctcagtggtccggaaggcgtattgctgggcattggctcactgttcgccggctggttcatctactccttcctctgcgactcggccctgggcaagcgccctgccctgctcggtttcattctgttcgtgctgttgatcgccgccgcgtacgggttcagcaaagtgttcagtgggcggggtgcgtacctgcacgtgggtgcagtgatcggcaccatcatggtgggcaacgtgttccgcatcatcatgccggcgcaacgcgcgctggtggcggcgattgcggaaaaccgcacgccggaccctgcgctgccggccaaaggcctgctgcgttcgcgacacaacaactacttcaccttgccggtgctgttcatcatgatcagcaaccacttcccgagcacctacggcagccaatacaactggctgatcctggcgggcatcgcagtggcggcggtgttggtgcgtcactacttcaacacccggcataacagccagaagtatgcgtggacgttgccggtgggtgcgttggcgatgatcagcctggcctacgtgaccggccccaagccggtggccgaagtggccaaggcccccgcggccatcgagtaccaaccattgccggaaaccgcactgggcggtggcttgaaaccggcagcgcctgcagcacccgccgctgaaccggcgccggcccaggcgacgattgatttcgacaaggtccacggggtgatccaggaacgctgcgccgtgtgtcactcggccaagcctaccagcccgctgttcagcaccgcacccgctggcgtgatgttcgacaccccggcgcagatccagcaacaggcggcgcgcatccaggcgcaggccgtggcgagccagatcatgccgttgggcaacatcacccagatgacccaacaggagcgggatttgatcggcacctggatcaaccagggggcgcgtaccaactgacaggctggcgcagatccaaatgtgggagggggcttgcccccgatggcagtgtgtcattcaacgcatcagtgactgaaccactgcaatcgggggcaagccccctcccacaagggtctccagtgttttgaagattgagctctacccggcaattgaatgccaaacaacacaacaataaaaaagatccgaggtgttgcatgaccgagttagccgaaccgcagattcccgccgcacccgccctggtgcggctgcccctcttgcaactgattctggtaggcctgcaacacgtcttgctgatgtacggcggcgccgtcgccgtgcctttgatcattggccaggccgcaggcctcagccgtgaagaaatcgcctttctgatcaacgccgacctgttggtggccggcatcgccaccctggtgcagtcgttcggcatcggcccggtgggcatccgcatgccggtgatgatgggcgccagtttcgccgccgtcggcagcatggtcgccatggctggcatgcccggtatcggcttgcagggcatcttcggcgcgaccatcgctgccgggttcttcggcatgctgatcgcaccgttcatgtccaaggtcgtacgtttttttccgccgttggtgaccggcacagtgatcactgcgattggcttgtcgctgtttcccgtggcagtgaactgggcaggtggtggcagtgccgccgcgactttcggctcaccggtctacctggcgattgccgcgctggtactggccaccatcctgctgatcaaccgcttcatgcgtggcttctgggtgaacatctcggtgctgatcggcatgggcctgggctacgccttgtgcggtgccatcggcatggtcgacctcagcggcctgtctcaggcgccgtgggtgcaggtggtgacgccgttgcacttcggcatgcccaggttcgagttggcgccgatcttgtcgatgtgcctggtggtggtgatcatctttgtcgagtccaccgggatgttcctcgcgctgggcaagatcaccgggcaggacgtcacgccgaagatgctgcggcgcggcctgctgtgtgatgccggtgcgtcattcttcgccgggttcttcaacaccttcacccactcttcgttcgcgcagaacatcggcctggtgcagatgaccggcgtgcgctgccgttcggtgacgatgatggccggcgcgtttctgatcgtactcagcctgctgccgaaggcggcgtacctggtcgcgtcgatcccaccggcggtgctgggcggcgcggcgattgccatgttcggcatggtggcggccaccggaatcaagatcctgcaggaagccgatatcgccgaccggcgcaaccaattgctggtggcggtgagcatcggcatgggcctgatcccggtggtgcgcccggagttcttcgcgcaactgccgctgtggatgagcccgattacccacagcggcatcgccatggccaccctcagcgcgttgtcgctgaatatcctgttcaacattctcggcggttctgaacgacctgccgttgctcctacgcattgattccttcgttcgcacaaaaacaataacgaaacagggaacatcaacatgcacacccttcacctggggccggtcacaagccgtgccccattctcgccccgcgcgcgctgtaacggcgcacttgagcccaggcctgggagccagtattctccgcgcccgctcgaatcgactcaaaaaaaaacagcaaatgtaaaagctgactgcaaggccaacttatcccggcctcctgtctgcggccaaagtgcgcaaatgtcctctgaattcgactgcatctcatgcagccgacggggattttttggcttttttaacaccttggcgcagctcttgctaaaagcactaaagctgaccgaacagacgatttttgcagcgaaccaaaaggcgccacaccagagcgcctgcgtagaagaaaaaccataaaactttaactcgggagcaaccgaatgaaacctatgttcaaaggcctgatgctggcgggatccctgctggccggtggccaagccgtggccggtgacctgttgcagtggcagaacaacagcctgacttacttgtggggcaagagctttaccgtcaacccgcagattcagcaaaccgtcacgttcgaacatgccgatgcgtggaagtacggtgataactttgtgttcgtcgaccgcatcttttacaacggcaaggaagacggcaacgtcgggcccagtacctattacggcgaaatcagcccgcgcctgtcattcggcaaaatctttgataaagacctgtcgttcggaccgatcaaagatgtattgctggcctttacttacgagttcggcgaaggcgacaacgagtcgtacctgctcgggcctggctttgacttgaacatccccggtttcgattacttccagttgaacttctaccagcgccagaccgaaggcaatcgcccgggtgacggtgtatggcagattaccccggtgtggtcgtacaccatccccgtgggcaactccgatgtgctgatcgacggtttcatggactgggtgacggacaacgacaagaacgcccgtggcacctaccacgccaacctgcacttcaacccacaggtcaaatatgacctgggcaaggcgctgcattggggcgacaagcagttgtacgtgggctttgaatacgactactggaagaacaagtacgggatcgaagattccggcgcgttcaagaccaaccaggacacggcaagcttcctggtcaagtatcacttctaaaagccactgcaagacaaatgtgggagggtgcttgctcccgatagcggtgtgtcagtcagtacatcagtgactgaacaactgctatcgggggcaagccccctcccacatttggatctatgccaggcctaggaaccgagtgatttcctcacgtttggccagcgcatctttgcgccccagctcgatcaactcgctgcaatatcccgcctcgaacagcaggtaactcaacacccccgccccgctcgtcttggtcgcccccggcccgcgcaaaaacaagcgcaacgccgccggcagttcctggcgatgccgcgctgcgatctcatcgatcggctggctgggtgcgatcaccagcacctccaccgccgccacaccaggcgcgacatggctgaactggttcaagcgttcgagcaattcgatatcgccttccaggctgtcaatgaacgtgctgttgagcatatgcccaccgatctgcgccagggtcggttcctgaccggtgtagctgcgctgcaccgccggttcattgcctcgtgggttgccgctgacacccaccaccagcacgcggctggcccccaggtgcaaggccgggctgatcggtgctgattgccgcaccgcaccgtcgccgaagtactcctggtcgagtttgaccggcgcgaacaacaaggggatcgccgagctggccagcaggtgttcgaccgtcagttgagtcggcaggccgatacggcggtggcgcagccaggcatcgatggtgccgccgccctggtagaaggtcaccgcctggccggactcatagccgaacgccgtgaccgctaccgcatgcaggtgtttggcgcggatcgcttcgtcgatgccgtccagatgcagtttgtctttgagcaacgccttgagcggcgtgctgttgagcagtgccaccggcacttgcgcgcccaagcccagcaggctgtggataaagaagcgactcgcctggcgaatcactcccggccaatcactgcgcaacaccagatggctgcgaaagccctgccagaacgcggtaagacgttggatcgcggcggtgaagtcggtggcgccactggccaggctcaccgcattgatagcgccggccgaggtgccgacgatcaccggaaaaggattaggcgcccccggtggcagcaactcggcaatcgccgccaatacccccacctgatacgccgctcgcgccccgccgccggaaagaatcaagcctgtaaccggttcagctgggcgcattgcgtcactccatgtggggaaaagtcgttcttatcagcggcgtttttcgtacagcttgggttcacccggcggccggctcttgaagcggcggtgggtccacaggtattgctcggggcattcacgcacggaggcttctacccattggttgatgcgcaggcagtcgacttcatcgctttcaccgggaaaatcggtgagcggcggatggatcaccaggcggtaaccgctgccatcggccaggcgctgttgggtgaacggcaccaccagcgccttgcccagcttggcgaacttgctggtggccggcactgtggcagcctggatgccgaacagtggcacgaaaatactttgcttggcgccatagtcctggtccggtgcgtaccagatggcacgcccggcacgcagaagcttgagcatgccgcgcacgtcttcgcgctccacggcgagggaatcgaggttgtgacgttcgcggccacggcgctggataaagtcgaacagcgggttgccgtgctcgcggtacatgccatcgatggtgtgcttctgccccagcaacgctgcgcctatttccagggtggtgaagtgcagggccatgaggatcacgcccttgccatccaactgggcctgcttgaggtgttccaggccttcgacgtgggccaggcgcgccagtcgcgggcgcgaccaccaccagctcatggccatttcaaagaacgcgatgccggtggaggcaaagttttccttgagcaactgtttacgctctttggcggatttttccgggaagcacagttccaggttgcgtgcggcgatacggcggcgttcgccggccacgcggtacatgcccgcacccagcaggcgaccgatggtcagcagcgcgcggtacggcagttgggtgaccagccacagcaggccgagccccagccataacagccagaaacgcgggtgaaaaaatacagctcgaaaacgcgggcgatccattacagattccggtaaagacaagggccgcgcattctacaacggttcgacccggcttgcggcgggtgagtgttctcgttataagtctcgacacttttcgtgacaagccgcttttgccgaccatgagccaaaccgaaccgctagaccaagatcccgtgttccagctgaaaggcagcatgctcgccatcaccgtgctggaactcgcccgtaacgacctcgacgccctggaccgccagctggcggccaaggtcgccctggcgccgaacttcttcaacaacgccccgctggtgctggccctggacaagctgcccgccggccagggcaacatcgatttgcccggcctgatgcgcgtgtgccgctcccatggcctgcgtaccctggcgattcgcgccagccgtatcgaagacatcgcggcagccatcgccattgaactgccagtactgccaccgtccggtgcacgcgagcgtccactggaaccattggtcggtgaagagaagaaaaaaccggaaaaaccacccgagcctgcgatcaagcctacaaagatcatcacctcgcccgtacgcggcgggcagcagatttacgcccagggcggcgaccttgtggtgatctcctcggtcagcccgggggcggaacttctcgccgatggcaacatccatgtatacggcccgatgcgcggacgtgccctcgccggcataaagggtgataccaaggcccgtattttttgccagcagttgaccgctgagctagtgtccatcgcaggccagtacaaggtttcggaagatttgcgccgtgatccgctgtggggggcttcggtgcaggtcaacctgtcgggcgatgtgttgaacatcatccgtctttaacggatactgccgcattttccaagcatctctagactctgatagcacagcgaaaccggcattacttatgtaggaattttttattcctacaaggctgtccgcctgcagcgagttccaagagatgtttttcagggactgaaaagtcctttttccttaggggtgaaacaccttggccaagattctcgtggttacatccggcaagggtggtgtgggtaagaccaccaccagcgccgctatcggtaccggcctcgctctgcgcggccacaagacagttatcgtcgacttcgacgtcggcttgcgtaacctcgacctgatcatgggctgcgaacgccgtgtggtgtacgacttcgtcaatgtggtcaacggcgaagccaacctgcaacaggccctgatcaaggacaagcgccttgagaacctgtacgtgctggccgccagccagacccgcgacaaagacgcgctgaccaaagaaggcgtaggcaaagtcctggccgagctgaaggaaaccttcgaatacgtggtctgcgactcgccggccggtatcgagaccggtgctcacctggcgatgtactttgccgatgaagccatcgtggtgaccaacccggaagtctcctccgtacgcgactcggaccgcatgctcggcctgctggccagcaagtcccagcgcgccgagaaaggcgaagacccgatcaaggagcacctgctgctcacccgctacaaccctgaacgcgtcagcaacggcgagatgctcggcgttgaagacgtgaaggaaatcctcgcagtgaccctgctgggcgtgatcccagaatcccaggcggtcctcaaggcctccaaccagggcgttccggtgattcttgatgaccagagcgacgccggccaggcgtacagcgatgccgttgatcgcttgttgggcaagaccgtggaacaccgcttcctcgatgtcaagaagaagggattcttcgagcgtatctttggaggcaactaaacaatgaaatttctcgacttctttcgcgccaacaaaaagccaagtaccgcgtcggtagcgaaagagcgtctacagatcatcgtggcgcacgaacgcggccaacgcagcacgccggactacctgccagccttgcagaaggaactggtcgaggtgatccgcaagtacgtcaatatcggcaacgatgacgtgcatgtcgccctggaaaatgacggcagctgctcgattctggaactcaatatcaccctgcctgatcgttgatcgaacaggcggccgccacggcggctcggtcaccttgatcccttttcgggaaccgggtgggcgagccgccgttggcgtttgttacgaggctgtttaatgccgctgtccaatatccacatcctgtatcaggacgatgccgtcctggtggtgaacaagcccaccctgctgctctcggtgcctggccgcgccgacgacaacaaggactgcctgatcactcgcctgcaggaaaacggctaccccgaagcccgtatcgtccatcgcctggactgggaaacctcgggcatcattctgctggcgcgggatgccgacacgcaccgcgagctgtctcgccagtttcacgaccgtgaaaccgaaaaagcctacaccgccctggcctggggccaaccggaactggacagtggcagcatcgatttgccgctgcgctacgacccaccgaccaaaccccggcatgtggtcgaccacgagttcggcaagcatgcgctgaccttctggaaggtgctggagcgttgcggggactggtgccgcgtcgagctgacaccgattaccgggcgttcgcaccagttgcgcgtgcacatgctctccatcggccacccgctgctgggcgacggcctgtatgcccatgagcaagccctggccgcctggccgcgcctgtgcctgcatgcaagcatgctgagcttcacccacccacagagcggcgagcgtttgcgtttcgagtgccctgccccgttctgaagaataaatacggtaaactcgcggcattgttgtctggagctatttatgcgcgaagcgttgaatcaaggcctgatcgacttcctcaaggcctcccctactccttttcatgccactgctgccctggcccagcgcctggaagcggccggttaccagcgtctcgatgagcgcgagacctgggccaccgaggccaacgggcgctattacgtgacccgtaacgactcctcgatcatcgccttcaagctcggccgccattcgccgctgcagggcggcattcgcctggtcggcgcccacaccgacagcccgtgcctgcgggtcaagccgcagcctgagctacaacgccagggcttctggcagttgggtgtggaagtctatggtggtgcattgctggcgccgtggtttgaccgcgacctgtccctggccggccgcgtgaccttccgccgcgacggcaaggtcgaaagccagttgatcgacttcaagctgcccatcgcgatcattccaaacctggccattcacctcaaccgtgaagccaaccagggttgggcaatcaatgcccagaccgagctgccgccgatcctcgcgcaatttgccggtgacgagcgcgtggacttccgcgccgtgcttaccgatcaactggcgcgcgagcatgggctgaacgccgacgtggtgctcgactacgagttgagtttctacgacacgcaaagcgctgcggtcattggcctgaatggcgacttcatcgccggcgcacgcctggacaacctgctgtcgtgctacgccggcctgcaagccttgctcaccagcgacagcgaagaaacctgcgtgctggtgtgcaacgaccacgaagaagtcggttcctgctcggcatgcggcgctgatggcccgatgctggagcagaccctgcgtcgcctgctgccggaaggcgatgaattcgtacgcaccattcagaaatccctgttggtgtcggccgataacgcccacggcgtgcacccgaactacgccgagaaacacgacgccaaccacggccccaagctcaacgccggcccggtgatcaaggtcaacagcaaccagcgctacgccaccaacagcgaaaccgccgggttcttccgccacctgtgcatggcccaggaagtaccagtgcagagcttcgtggtgcgcagcgacatgggctgcggctcgaccatcggcccgatcaccgccagccacctgggcgtgcgcaccgtggacatcggcctgccaacgtttgccatgcactccattcgtgagctgtgcggcagccatgacctggcgcatttggtgaaagtgctgggcgcgttctacgcgagccacgatctgccctgataatttgggctgactcggtcaaaaatgtgggagggggcttgcccccgatggcggcggatcagtgactatatttgtagtctgaccctctgcaatcgggggcaagccccctcccacattagatctgcgtatacctgacctgcatcacctgcactttctgcaatccggcctagacttgtcagtattcccactccgacaaggccgtcccctcccatgatctccatgtcttccttccacgccatgcttatccctatcctgatcggcatgatcatgttggccgtgggtttcaactttcgcgacaagcccctcggcgtgttcggcatgtggctcggcatgctgctgatcctgggcaccgtggtgtacaagatcctcgccaaactggccgaatgacgcttgcactcgtacactcgctcaacccgtcgtttccaaggttgaccgcctcgtgctttcccgtctgtttgccctgccctgctattgcttgatcgccctgctcaccttgctgccgctcacgcctgcccatgcagtgggtttgcccggcttgctgggcagtaccaacaagacccagccccaggccgaagtgccactggggcagtcgctggacgaggtgatcaagaccctggaaaacgaccagcagcgcacccagttgctgagcgacctgaaaaagctgcgcgccgccacgcaaaaggcccaaccggccgccgaagaaggcgtgctgggcttgatcggcggcaccctggccaacctggaggcacagttctccggggccgacagcccgctggggcgctggtccaacgaagtcgacctggccaaggaagaactcgacgcactgatgctgccggccaatgaatggctgccgatcattttcgggtttgccttgatccttgccgtgtggagcctgttggcgtacgcgctgatctggctcagtcaccgggtgcgcgaacgtttcggcctgcccgaagaattgccgcaacatccacgcacctgggacatggtgcgcttcgccctgcgcaagctcggcccatggatgatcgccctggtgatcacggtgtacctgagctacgccctgccctcgtccctgggcaagtccctggcgatggtgctggcctacgcactggtggtcggcacctgtttctcggcgatctgcgtgatcgcgttttctgtactcgacggcccgcaccgtcatcgcgcgctgtatatcctgcgccaccaggcgttccgcccgctgtggtggatcggcagttttgccgcctttggcgaggccttgagcgacccgcgactggtccaggcgctgggccagcacctgtcccacaccgccgcgacggtcgccaatgtgatggcggcgctgtcgaccggtgtattcatcctgcgtttccgccggcccatcgcccacctgatccgcaaccaaccgctgtcgcgtcgcctgacgcgccgcgccctcagcgacaccatcgaaatcatcggctccttctggtacatcccggccttgctgttggtgggcatctcgctgttcgccaccttcgtgtctgccggcgataccagcacggcgttgcgccagtcgctgttgtgtacggtgctgctggtgttgtgcatggtgatcaacggcctggtccgtcgccacgcgctcaaaccgcagcgtgggcacaagcgtcacgcgctgtattccgaacgcctgaaaagcttcgtctacaccctggcccacctgatcgtgtggctggtgtttatcgagttgggcctgcgggtgtggggcctgtcgctgatccgctttaccgaaggcgatggccatgaagtcagcgtcaagctgttcggcctggccgggaccttgctgttcgcctggctgatctggattctcagcgacaccgcgatccaccatgccctcacccgctcgcgcaaaggcctggccaacgcgcgggcgcagaccatgatgccgttgatccgcaacgtgctgttcgtgaccatctttatcattgctgccatcgtcgccctggcgaacatgggcatgaacgtcacgccgctgctggcgggcgccggtgtgatcggcctggccattggtttcggcgcgcagtcgctggtggcggacttgatcaccggcctgttcatcatcatcgaggactccctggccatcgacgactacgtggatgtgggcggccacctgggcacggtggagggcctgaccatccgtaccgtgcgcctgcgggatatcgacggcattgtgcacaccatcccgttcagcgagatcaagagcatcaagaactactcgcgggagttcggctacgcgatcttccgggtggcgatcccctacaacatggaaatcgacgatgccatcaaactgatgcgcgatgttggccagaaaatgcgcaacgacccgctgcaacgccgcaacatctggtcgccgttggagattcagggggtggagagtttcgagtcgggcagcgcgatcctgcgggcgcggttcaagacggcgccgatcaaacagtgggaagtgtcgcgggcgttcaacctgtcgctgaaacggcatctggatgaggcggggttggacctggccacaccacgcttgagcgtgcaggtggtgacgggggcttcgggcggattagacaaagaaaaaaatacctgaaagcaacacagctcaaaatgtgggagggggcttgcccccgatgnnnnnnnnnnnnnnnnnnnnnnnnnnnnnnnnnnnnnnncatcgggggcaagccccctcccacatttttgatctgtggcgtttacacgatcgcagtgccatccatcttctggcgcaggctcaacgggcgcatgtcggtccagacttcttcgatataggccaggcactctttcttcaggccgctcttgcccacggtgcgccagccttccggcacggccttgtagtcgggccagatggaatactgttcttcatggttgaccactacctgaaacaggatgtcgtcgcggtcaaatactgaggtcattgctgttctccatcgctaaaaggctggctgcgcaccgtgcgcagccctgatatctgtagaaacgtaccaggctggcaaaaaattagaggctggcgaccgctgccgccaacgcgcgaccgaagatgtccgccacccggtccacttcggcggcagtgatcaccaatggcggcaggaagcgcaccacactgccgtgccgaccgcccagttcgaggatcagcccgcgcttgaggcattcacgctgcaccagcggcgccaattggcgatgcacgggcggatggccttgaatgtccggcgtgccgttcgggtcgaccagttccacgccgagcatcaacccacggccccgaatatcccccaggtgcgggaagtcgcgctgcaggatgcgcaggtgttcacccaggcgctcgcccatggccgccgcgtggccggccaggtcgtgatccttgaggtagcgcatcaccgccgaacccgccgccatggccatctgattaccacggaaggtcccggcatgggcgcccggcagccaggtgtcgagccagtcgcgatacaccaccaccgccagcggcaagctgccgccgatggccttggacatcaccaccacatccgggatgatcccggcgtgctcaaaggcaaacatcttgccggtgcgaccgaaaccgctctggatttcatcgacgatcaacgccacgcctgcctgctcggtgatgcggcgcaggccgcgcagccagtccaggtcagccggaatcacgccgccctcgccctgcaccacttcgacaatcaccgccgccggcagcaatacaccggcctccggatcattcagcaggttttccaaataatgcaggttgacccgcacgccttccgcgccacccaggccgaacgggcaacggtagtcgtaggggtatggcaaaaattgcacaccattgccgagcaaggcgcccaggggtttcttcggccccaggctgcccatcaggctcaaggcgccctggctcatgccgtggtaaccgccctggaaggacaatacggtgctgcgcccggtggcggtgcgtaccaacttcaacgcagcttccaccgcatcggtgccggtggggccgcagaactggattttcgcttcccgcgccagcgcgggcggcaacaaaccgaacaggtcctgcacgaactggtccttgaccggggtggtcaggtccagcgtgtgcaggggcagttcatcggccagcacctgttgaatagcctcgatcacgaccggatggttatgccccagcgcgagggtgccggcgcccgccaggcagtcgatgaagctgcgcccttcgacgtcttccacgtaaatccccttggcacgcttgagtgccaggggaatgcgccgcgggtagctgcgggcattggattcctgctggcgctgacgggccagcagcggggtttcgtcgaactggtaaagcgtttcatgcacctgggcgtcttcgatacggctggtagcgactgacatttctcgatccctcaatacgctgatgatggtgaccaaactgccgatccgctggcgtctggccccaaggggcatgcgcacggatttcctgttctggaaacgcaccagcgtcgaggggatttagggcctttgatcactcaaaaccaaatgtaggagggggtttgcccccgattgcagtggatcagtcactggtgttgtgactggcagactgcaatcgggagcaagccccctcccacattggaactgcgttcggcgtcatagaccgcggtatttttcgttcagtgcatacaaaatcgcgcaggtctccgcatccagaaacccgcagtaatcccgcgcccgaaagtgcatctgaaacgcccgcgtcctctgttcaaacccttgccgattcttcgccggcgcatagccatagcgttgaaacgcccgctccacctcgacctccggcggcaggcccaggcaaaaccggcgctgatacatcgcccgcgtcgcctcatcaaaccaggcccccacccctgcttcatgcagacaccgccaaggcaggcgcggccccggatcgctcttgcgcccgaacgccacgtccgcatgcccgaggaggtcggtgggcccgatctgcgggtatcgcccaagaatgtcgcgaaccagcgcaatcaatacgtcgacctgttcctgcgcgtaggcaggaaagctgaacacgccaccgtcatcccgcgccaggttgacgatctcgatgccaatcgaacggctgttgaggttgtcgcgccccgcccaatgactcaccccggcgtgccaggcacgcttgtcttcctccaccaaccggaagacacgcagctcttcatagcccgccgcgcgatagtcgggctcatcagggtcgggcagcaagtagtgggcactcaccccatcctgagtcagggtacgcagggaggcaccaaaaggcgctgcggtgtaatgcaggatcacctgccgcacgggctcgccgttgcgttcgttgaagcctctggcagggaaactggtatcgatgaccaacatgagaaccgtccttttcaatacaggccgagtcgttcagcccgttcaagcgcaaaaaaattaccgccatcctgaaggcttgaacttcaggagggcggtaactatttggcacttgaaagaaaagtgatcagcagcgcaacggcatgcccaggtcgacgcgcaaaccatccggccgactgtcgaatttcaacgagcaggaacagcgttgcacgatcgcttgcacaatcgccaggcccaggccacagccttcgctgttaccgttgcgccagaagcgttgggtcaggtactgcaggtcctcggcggcaatctgtttgccgtggtcacgcacgcggaacaccacattatcggcttcggtgaacacgctgagctccacccgggtgtccgtcggcgtgtggcgcaacgcgttgtccagcaggttgcgcaaggcggcgacagcgaggcccaccggcatccccaccggggtggccgagaggttgtccggcaggatcaggtcgatgcgcgagttgtcaccggcattggcatcctggatcgccaggcgcgctacttcttcggcactggagtgcatgccatcgtcaaacgacaggttgccctccacccgggccagcaacagcaattgctccagggtccgatgcaggcggtcggcgccctcctcggcatgggccagggactggtcgcgggccgcgccctcggtcatgcgcgccacttgcaggtgggtcttgatcgcggtgagcgggctgcgcagttcgtgggcggcgtcaccggtgaggcggcgctcgcgctcgatggtcttggcgatgcgttgcaacagctggttctgggtgtcgagcagcggctcgagttcgctgggcaacgggtggatctgcagcggttcaagggagtcggcactgcggcgcatcaaggcgtcacgcatacggttgagcggcagcaggctctggccgatgcccagccacaacaggcacaggcagcccagcatcgccacgcccaccggcaccgacgctgccagcaggatcgacaggttcagcgcctcgcgctccacttgccgatcggccgtggtgatcagcaggtcaccccgggacagggtgaaactgcgccagcccacgccatcgacgacctggtcgcgaaacccgctcttgcgcgactccaacccctcatccggcgtggtgtggctgcgcgccaggatttccccgcgcagggaactgacctggcaggccatgccgccgggcacattcaattgttcagcgctgaaatgcgcgccgccgctgacgctggccaggcccggcatctgttcggtcagccccgccaccatgcgtgccgacgccaccaggcgttggtcgagggagaacatcatctggttgcgcaggtcgttgagcatccaggccgccgccagggcccagatcagcacaaaggcggcgcccagcttgaacgtcaggcgcagacgcaggcttttcacgatgcgtcctcgcctccatcggccgggccaaggcgatacccgaggccgcgcacggtctcgacgatgccattgcccaatttgcgccgcaggtggtggatatgcacgttgagcgcgttgctttccagctcgtcgttgaagccgtagacgctgtccttgagctgttcgctggagagtacccggcctttgttgtgcagcagggcttgcaacagcgcctgttcgcgacgcgacaggtcgacgggctcgccgcccaggaaggtttcgcgactgctggggtcgtaagccaggcggccatgctcgatcaggttgacgctgcgccccgccacccgtcgcaacagggtttgcaggcgcgcggcgagttcgcgcaggtcgaagggtttgagcaggtagtcatcggcgccggcttgcaggccgtcgacgcggttggtcaccgagtcccgcgcggtcaggatcagcaccggtatctccagaccctggctgcgctgttgctgcaacaacttgaggccgtcttcgtccggcaggcccaggtcgagcaccatgatgtcgaacgtcgccgccttgagcatcgcgcgtgcggcaccggccgtggccacgtgttcgacggtgaaaccctgggcggtgaggccggccacaatgccgctggcgatcagtttgtcgtcttcacagaccagtacgtgcatggtgaacccttcatgaaagatggggagattaaaggggctgcggattaagcgcagattatgccgctaaacaccccacactcaatctagaatagccgtggttaatcatcggttaatcaacgccacacattgtgtgcctacttgcatcgaactaaggcctgaccatgcggcatctgtttacctttctgctggtgttgttcgcggggctggcccaggccgcgccgggcaacccgtttgagaccaaacccgatttcctcccggtgggcaaggccttcacctttacctccgaacgtcttgaaagtggcgagacccagttgtattggcagattgccgacggctattacctgtacaagcagcgcatgaaattcgacggcctggccgaaaagcccgtgctgcccaaaggcgaggcccacaccgacgagttcttcggcgaccaggaagtgtatcgccaaggcctggaagtgaagattcccgccggcgccaccggccaggtcaagctgggctggcagggctgcgccgacgcgggcctgtgctacccgccgcagtcgatcaccgtggacctgggtggcaaccccgccgtcgccgccaccgcacaagcccaggaccagagcctggccagcggtttgcaacagcgcagcctgggctggagcctgttgatattcttcggcctcggcctgttactggcgtttgcgccgtgttcgttgccgatgttgccgattctcgccggcctggtggtgggcagtggcgccagcccgcgtcgcggttttgccttggcgagcagctacgtggtgtgcatggcgttggtgtatgcagcgctgggcgtattggccgcgcttttgggtggcaacctcgccgcttggctgcaaacaccttggattctcggcagcttcgccgccctcttcgtggttcttgccctgccgatgttcggcttcttcgagctgcaactgccggccttcctgcgcgaccgcctggacaacgtcagccgccagcaaagcggcggcagcctggtgggggcagggattcttggtgcgctatccggcctgctggtgggcccgtgcatgaccgcgcccctggccggcgccctgctgtacatcgcccagagcggcaatgcgctgcacggtggcctgatcctgttcgccatgggcatcggcatcggcattccgctgttgctgctggtgaccgtgggcaaccgcttcctgcccaagccgggcacctggatgaacgtgctcaagggcatcttcggcttcctgttcctcggcaccgccgtgttgatgatccgcccggtggtcggcgaaaacctgtggatcggcctgtggggcgtactcgcgctgatcatggcctactgcggctggaccctggcccgcgaatacggtctggccgccaaagtgtttggcgcaggttccctggtactgggcctgtggggcgcggtgctggtggtgggcgcagcggggggcagcgacgacctgtggcaaccgctgaaggtctacagcggttcacgggtcgccggcgcagcgtccgcccacgatgccttcatgaccatcaacgacccggccgtgctgcaaagccagctcgacagcgccaaggcccaaggccaatgggtgttggtggactactacgccgactggtgcgtgtcgtgcaagatcatggaaaaacaggtgttcggcaaacccgaagtcatgcaggcactcaaagacgtacgcctgctgcgcctggacgtcaccgccgacaacgccgccagccgcgcgctgctcggccgctacaaagtgcctggcccaccgagcttcgtgtggatcggcccggacggtgaagaacgccgcgcccaacgcatcaccggcgaagtggatgccgccgctttcctgcaacgctggacgcaaacccgagacgctctctgatgctgaccctgaccatcggcaccttcgccatcgccctgaatcacatcctgctgatcagcgcgctgattctcgccaccctggtgggttggcgcgtggccaagcgtggtggtgaaaacccggaatcggtgctgttcagcctgttcctgctgggcatgctcgctgcccgcgtcagctttgtgctgatgtactggagcgactaccgcaacgactgggtgcagatggtcgacctgcgcgacggcggcttccttgcctggcccggcgtgatcgccctggtcttgggcgctctcgcctacggctggcgccgcccagccctgcgcaagccactgagcgccggggtgatcaccggcctggtgttctggggcatgaccagcttgtccctgagcctgtatgacaagggctcgcagttgccggagataaccctgcgcaatgccaatggcgaggtggtgcaattggccgactacaagggcggcccgctggtgatcaacctgtgggccacctggtgcccgccgtgccgccgcgaaatgccggtgctggagcgtgcccaacaccaacgtcccgacgtgaccttcctgttcgtcaaccaggccgaaagcatgcagagcgtcagtacctttcttgcgacccagggcctgacgctggacaacgtgctgttcgacgccagcggccgcctcggccaggccgtgggctcgatggccttgccgaccaccttgttctatcgagccgatgggcgcttgatcaacagccacctcggcgagttgtcccaggccagcctggcccgcgccatggaacccttcgacaccgcccctgaaaggaaaccgacatgccaagcctccgccacctgctgaccctgctgccgctgacactcgcggccaccctggcccaggccgaagactggcccgcaccgatcaaacagatcgaggccaagggcgccaagatcctcggcaaattcgacgcccccagcggcctcactggctacgccgcccgctaccagaaccgtggcatggccctgtacctgaccgccgacggcaaaagcgtgatcgccggcaacctgtacgacgcccaaggcaacgacctgagcagcgcgccgctggaaaaactggtgtacgcaccgatggcaaaggaagtctgggccaagatggaaaaaagcagctggatccaggacggcgacgtcaaggcgccacgcatcgtctacctgttcagcgaccccaactgcccttactgcaacatgttctgggaacaggcgcgtccgtgggtaaaggccggcaaagtgcagctgcgccacatcatggttggcatcatccgcgaagacagcccgggcaaatccgccgcgctgtttgccgccaaagacccgcagaaagcgttggaagaacatgaggccgccggtaaaggcagcaagttgcaggcgctggccaagattccggcggatatcgaggccaagcttgatagcaacatgaagttgatggatgagctggagttgtcggcgacgccggcgattttctatctggatgacaagggggggttgcagcagcagcaaggggcgccttcgccggagaagttggtgaagatacttgggccgaagtaggcggcgccttgactgacgccatcgggggcaagccccactcccacattagaaatgcgctccaaatgtgggagggggcttgcccccgatgaggccctgactgacagcgaaaattaaagcccctccaactccgccatcaaatcactcaaccgatccaccttctcggcactgatctcattcgccgccaacccctcgatatactcggccaactccgccaccgtgctgcactcgaacatcgcccgcagcggcacatcccgctgcaaggtcttctgcacccgcgaggcaatctgcgtggccagcaacgaatgcccgcccagttcgaagaagttgtcctgcacccctacccgctcgactttcagcacttcggcccagatgtctgccaaggtggtttccagctcattgcgcggtgccaggtagtcctggctgtgcaactggccgatctccagcgccggcagggccttgcggtcgagtttgccgttggcgttgagcggcaggcggtcgagccacagccagtgcaacggcaccatgtattccggtagctcggcgcgcaggcgttgcttgatgcggtccaggcgttcgcttgggttcagtgcctcatccgccgccaccagatagccgaccaggtgcttgccgttgacgccctcctgcacacccaccgccgcgtcgcgcacttccggttgttcgtgcaggcgcgcttcgatttcacccagttcgatgcggtaaccgcgaatcttcacctggtggtcgacacgtccgacgtattccagcgcgccatcactgcgacggcgcgcgaggtcgccggtgcggtacaggcgctcgcccggcgcaccgaacggattcggcacaaacaccggcgcagtgcgcagcgggtcactgacataaccgcgaccaacgcccgtaccggcgacgcacaactcgcctaccgcaccttggggcaccagctccagcgcaccatccaacaggtacaaacggttgttgtcggtcggcgtgccgatcggcagataggtgcctcgggtcgacgccaggtcgacgcgataaaacgccacatcgtccgagcattccgccgggccgtaggcattcaccagcccgatctgcggataacgctgcaaccattgatgcgccagttccggtggcatcgcttcaccggtcggcaacatccagcgcaggccgtccaggccgatacggtcctgggccagcatgccctggatcagcgacggcacgctttccagcacggtgatgccctgggcctgcacatgttccaacaggccctggggatcatgcgcgatagtgttcggcacgatgtccacccgcgcaccgaacaacggtgcggcgaggaactgccacacagaaatatcgaagctctgcgaagcggtctgcgcgatcacatccgcgtcactcaaggccaggtacggcaccttgctcaactggttattgagcatgccgcgctgttccaccatcacgcccttgggcaggccggtggagcccgaggtgtagatcacgtaggcgaggttgtccgggccgctgtagattcccgggttttcaccacgtgccggtatctcttcccacaccagcaattggcaatcgaagccgtccagcaactcgatggcctgctcgcggcacacctcggtgcacaccagcagcggcgtgcggctcaggtcgatgatgctgcgcagacgctggcttggcaggcctgggtcgagcggcaggtagccggcaccggccttgaagctgccgatgatcatgcccagcaggtcaaggttacgttcgcccagcaacgccaccggttgatcgaggcccacgccggctgcaatcagcgcatgacccaggccgttactgcggcggttcagttcgtcgtaggtccactgctgatcgaggcaactggcggcgatgcgctgcggatgcgcggccacctggtcctcaaacaactcgacatagctgcgctccagcggataggcgtgctcgctctggttgcagccctccaccaggaactggcgctcctgttcgccaatcaacggcaagtccgccatgtcgccatggaagccctgcaccagcgccagcagcaggcgcttgaactcgccgagcatggcttgcacggtggtctcgtcgaagtagcgctggtcgtaggacaggtgcagccccaggtcatcccccggatagcacacggccgtcagcgggaagttggtgtgggtgcggccggagtccgaggtggcattcaggctttgtgcacggtccagcaccgagacttccaccggggcgttttcgaacacgaacaggctgtcgaacagcggctggcccttgggcagttcgctgtgttcctgaatcgtcaccagcggcaggtattcgtactcgcgcagttgcatattgctgtcgagcaagccgctcaaccactggcgcacgctgcaacgctggtcgtcctcgggcagcttcacccgcagcgcgatgctgttgatgaacaggccaacggtgcgctgcatctcgggcatctctaccgggcgcccggccactgtgacgccaaacagcacgtcacggtcgccacttaaacggcgcaataccagcgcccacgctgcctgggcgaaggtattgaccgtcagttggtgagcctgggccagctcacgcaattgtgcaccgtcgcgagcgtcgaggcgggtgtaacagtcgcccaccaccatgccaccgtggccggcgtggtcacgcaggaacggccggtcactcgggattggtgtggtgcgctcgaaaccttgcaggttgtgctgccaccactgacgtgcttcgctcaggttctggcgttgcagccaggcaatgtagtcgcgatagcgcggcggtgtggccagttgcgcctcgcgcccctcgccgagggccatgtagatctcgaagaagtcattcatcagcaacgaacggcaccaggcatcgatgaggatgtggtggttgctcatcatgaaccagtagcgctcggcgccgacgcggatcaggcgcaggtggaacggggcctggttgagcagatcgaaaccggcttcgcgctcctgcttgagcagtgcttgcaggcgcggctcatgttcgctttccgggtcagcactccagtcgaggtattcaattggcgtgctgcccggtgcgtggatcacttgcagcatgtcttcgccgatgttccagcagaacgaagcgcgcaaggcttcgtgacgggcgatcaccgcctgccaggcctgggcgaaacgctcggggtcgagggcgctgttgatgcggtagcggtcctgcatgtagtagaggccggtgcccggctccagcaaggtgtgcagcaacaggccttcctgcatcggtgtcagcgggtagacgtcttcgatgacactggccggcaccggcaggctgtcgagttgcgcctgggtcagatgggccagcgggaagtcggacggcgtgaggccaccggcatcgtcctgcaagcagtgccgggtcaggctgtgcagttcggccaggtaggcctcggccaattcacgcaccgtgtgctgatcgaaacgctcacggctgaaggtccagcgcagcaccagttcgccgccgtacacctggctgtcgatgctcaactcgttgggcagcggcgcgtccgggtcatgggccaggccggcggactcgtccagcgggtggaacagcgcatcggcgccgaagctctggtcgaactggccgaggtagttgaaggtgacctgcgcgctcggcaaggcggccatgctgtgcttgcacacatcatcggccaggtagcgcagcacgccataacccaggcctttatgcggcacgccgcgcagttgctccttgatcgccttgatcgaatcgccctgcccggcctgcggggtcaggcgcagcgggtaggcactggtaaaccagccgacgctgcgggtcaggtcgatgtcatcaaacaggctttcacggccgtggccttccagctggatcagtgccgaagcatggccagtccagcggcacagcacacgggccagggcggtcagcagcaggtcattgacctgggtgcgataggcactcggggcctgttgcagcaactggcgggcgtgttcggcatccaggcgcacgctgacggtgtcggcatcgcggttgcgcaacgaaccgtgcgggcgagtcaccggcaaccccacttccggtccggccaattggtcctgccagaggctcaattcttcacgcagggattcgctgccggcatacgcctgcaaacgcgcggcccaatcacgcagggcactggtcttggccggcaggctgaccgattggccgtcactcagttggcggtagaccgtttgcaggtcttcgagcaggacgcgccaggacacgccatccaccaccaggtgatggatcgcgatcagcaggcgttgctgcccttcgggaccgtccaccagcaaggcgcgcagcagcgggccgtgttgcaggtcgaggctgcgctgggtgtcggtgaacagcgcggtgcactgcgccatatcacgcacttgcgcctgcatcagcacgccgccttccggcacggccagatgctcggcgtgccaccgcgcgtcgcgctgggagaagctcaggcgcagtgcatcgtggtgttccagcaccgccagcagcgcttgctccagacgatggggttgcagcagttgcaggggcttgagaaccagcgcctggttccaatgctgacggttagggatctcgttgtcgaagaaccagtgctggatcggcgtgaggcccgagctgccggtgagtacgccttgctcggcggtgatctgctcggagcgcgaggccacggcggccagggtttgcacggtctggtgctggaacaggtcgcgggggctgaaatgaatcccggcctgccgcgcacggctgaccacttggatcgacaggatcgagtcgccacccagttcaaagaagttatcgtccaggccgacttgctgcacattcagcaccgcacaccagatcgcggccaacgtctgctcaagctcgttgcgtggtgctacataggtctggcgattcgcctcgggatccggttgcggcaacgcacgccggtcgagtttaccgttggaggtcagcggcatgctgtcgagcacgatcaggtgtgcgggcaccatgtagtccggcagttgcgccttgagatgcgccttgagcgcatcgcgcaatgcgccgtgctcggcatcgctgaccaggtacgccaccagctgcttgccactcggcgaatccagcgccagcaccaccgcttcacgcacggattcatgttccagcaggcgggtttcgatctcgcccagttcgatacggaagccgcggatcttcacctgatggtcgatacgccccaggtactctaccaggccatcggcgcgttggcgcaccaggtcaccggtgcggtacaggcgcgcaccgttgctcgcaaacgggtccgcgacaaaacgctcggcggtcatgcccggacgctggtgataaccctgggccaggccggcgccaccgacgaacaactcgccggtcgccccttgcggcaccaatgccatgtcggcatcgagaatataggccacgcgctcaccgatgatgctcccgatcggtacgctggccgcgccctcctccaactgctcgggcgcgaggctggccagtggcatcaccacagtttcagtcgggccataggcgttgaagaacacctgcggctggaacgcggcgcggatgcgctgcaagtgttcgccggtcagcgcctcgccgccggtgatgcacatgcgtaccggcaacgtctgctgctgggtcgccagccattgcgccaactggctgccgtagctcggcgtaaagcccaggatagtgatgcgatagctgcggatcagcccgcagatttcttctgcatcccactggccctgggcccgcaacaccacctgcgcaccgctgagcaacggcaccaacaggcgctcggtggcggcgtcgaagttgatcgaatagaagtgcagctcacagtcgtccgggcgcatgccgaaccgctcgatcaccgccgcgcaatgcatggcgatttcaccgtgggccaccaccacgcccttgggcttgccggtagagccggaggtgtagatcaagtacgcctgatggtgcggcaggctgataaacggcagctcatcggacgggtagttggcgagtaccggcaaatcatcttccaggcaccagcacgccacggtcgccggcaattcgcccagcgcttcgaacatcgctgcgtcgctgagcagcaggccgatgccgctgtcttcgatcatgtaatgcaggcggtccagcgggtattccgggtccagcggcacataggcgccgccggccttgaggatcgccagcaggccgatgaccatttccagggaacgtggcagtgccaaccccacacgcacttgcgggccgacgccacgctcgcgcagcatccaggccaggcggttggcgcgggcgtccagttcgcggtagctgagggtcacgccggcgaaggtcaacgcgggcgcatcgccacgggctttcgcctgctgactgaacagcgtgtgaatgcactgatcaaggcggtgctcgcccgcttcgacgcccaggctgtcctgcaacgcgcgctgttccgtggcgctgagcaacggcaattcgctcaggcgctgctcgggactggcgatcagcgcttccaacagattgcgccaatgttccgccatgcgcgcaatgcgcggctcgtcaaacaaatcggtgctgtaggtcaggcagcaacccagacgatggtcaaggtcggtgacttccaggttgaggtcgaacttggtcgcccgcgcatcgttggccaggtactcgacggtcatgccagccagttggcggttctgctggaattcccagcgctgcacgttgcacatcacctggaacagtgggttgtaggccgcgctgcgcggcggttgcagggcttccaccaagtggtcgaagggcaaatcctgatgggattggccttcgatcacagtgtggcgcacctggtcgaacagttcagccacgttcatctgcccattgagctggcaacgcagcacctgggtgttgaggaacgcaccgatcagcccttcgctttccgggcggatgcggttggccacgggcgcgccgatgcgcaggtcggtctggccgctgtagcggtagagcaacacggccagggtggcggtcatggtcatgaacagggtcaggccgtgttcggcgttgaaagcacgcacgcgggcggccaggtcatcgctcaaatcgaagcggtacaactcgccccgatggctttgcacgggcggacgtggacggtcgccaggcagttcgagcagcggatgttcggtgcccagttgccgagtccagtaatccaactggcgctgacgttcacccgcttccatccactggcgctgccacacgctgtagtcgaggtactgcaccggcaacggcgccagcggcgacaggcgttcgtcgataaaggcttcgtacaacgcgctgagttcacgggcaaagatgtccatggcccagccttcggtgacgatatggtgcagggtcaacaccaggtaatgttcgcgctcggcggccttgaccaggcaggcgcgcagcaacggcccggtttccaggttgaacggcgtatgcgcctcgtgatcggccagttgctgcaagcgctgctggcgttcgctttcgtccaacgcggagaagtcctgccagtccatgcgcaggccggtctgcgtcgagaccttctgataagccacaccgtcgatactcggaaaggtggtgcgcagggtttcgtgccgcatgatcagcgcttgcaacgccgcctcgaaacgccccacgtccagcacgccacgcaagcgcgccatgccaccgacgttgtaggccgggctgtccggctccatctgccagaggaaccacatgcgctgctgggaataggacaacggcaccggctggctgcggtcgaccttggcgatggcggtttgttggttgcgttgccccgacgcctggatcagcccgacctgttcggcaaaagcgcccaactcgctggcttcgaacaaggtgcgcaacggcaactcgacgtcacacgcctggcgggtgcgggagatgatttgcgtagccagcagcgagtggccgcccagggcgaagaagtcatcgtgcaggccgattttcggcagaccaaggacttcgcaccagatctcggcgatctgctgttgcagcggcgtttcaggctcgacgtgctcacgggtttgccacaccggctccggcaacgcgcggcggtcgagcttgccgctggggctcaacggcatggcgtccaggcgcatcagcagcgccggcaccatgtactccggcagttcggcggccagggcgctcttgacctgctgttcgcccagttcggcatgggcggtgtagtagccgatcaactgggcgtcacgcaccagtaccacggcctgggcgatgccgtccagggcgagcaggcgcgcttcgatttcctccggttccacgcggaaaccgcgcagcttgacctgttggtcgagacggccgaggtactcaagcacaccgtcggcgttccagcgggcacggtcgccggtgcggtacaggcgcgttccttggtggtcggcgacaaagcgctcagcggtcaacccaggacggccgaggtaaccccgcgccaggccgataccgccgatgcacagctcacctggcacgccaacgggcacggggttgagctgctcgtccagcacacggcagatcacattgcccagcggacggccaatcggcgagcgttcgccatcctcggcgcggcagtgccagtgggtcacgttgattgcggtttcggtcgggccatagcggttgtgcaattgcaccgccggcaactgggccaacacgcggttgcgcagctcggcaggcaaggcttcgccaccggagaacaggcggcgcaggctggtgcattcggccaccagcggttcatcgataaacagctgcaacaacggcggcacaaagtgcagcgtggtcacgccgtgcgcctgcaccaactgcgcgatgcggtgcgggtcgcgatgctcgccggggccggccagcaccaggcggcaaccgctgatcagcggccagaagcattcccacaccgacacgtcaaaactgatcggcgccttttgcatcagcacatcgctggcgtcgagttgataagtggcctgcatccactgcaagcgctcggccaatgccgcatgggtattgcccacgcctttgggctggccggtggaaccggaggtgtagatcacataggcaaggttatcgccgtgcaggtgcaggccgggcggctgggtcggccagctgtcgaggtgcaggctgtccatggcgatcacgcacacgccttctgcattcggcacttgctccagcagggcggtctgggtcagcagcaggtggacgccgctgtccttgagcatgtaggccaggcgttcggcggggtagtccgggtcgagggggacataggcaccgccagccttgatgatcgccagcaggcctatcaacagttgcggcgaacgctcggcggcgatggccacgcacacgtccgggccgacgcctttgtcgcgcaggtaatgggccagacggttggcctgggtgtgcagttgggcgaaggtcaggctgccgccgtcccagaccagcgcggtgtggtctgaagtctgctggctgagcaggtcgggcagccactgttgagccggcgcgcagggggcttcgctgtaacgcgcctgttcgtcgtgctgcatcagcatgaggtcgccgatggcttgctcgggctgttcgcagacagcgtgcaacaggttgatatagtgctcggccaggcgctggatagtcgcgttttcgaacagctcatcggcgtagtcgaacgacaggctcaagcgcccgttgcggtcctcttcggtgtgcagttgcaggtcaaacttggcttcacggctgtgccacggcagctcgtcggcgagcatacccggcaggcggcgcaaggcactgaggtcgcgttgctggtggttgaacatgacctggaacaggccctgttcgcgggcttgcgggaaagcttccaacagttgctcgaacggcaggtcctgatgggcctgggcgcccaaggccgtctggcgcgtggcggccaacagctcgttgaacggcaggcgcccatccagctccgcacgaagcaccagggtgttgatgaagaagccgaccaggccttgggtttcctggcgcgggcggttggcgttgggcacgccgatgcggatatcgcgctggccgctgtagcggtagagcaggctctggaacgctgccagcaacagcatgaagggcgtggattcgttggcctgggcggtctggcgaatggcttcgctgaggctcgcacccaagcgcacgctatggcgcgaggccgtatggcggtggtgtgccgagcgcggatggtcggtggccaggctcaggctcgggtgttcttcacccagttgcgttttccagtacgccagttggcgctggccttcgccttcggccagccattggcgctgccaactgccgtagtcggcgtagtgcagggccaggggcggcaacgccagagtctggccctgggcagcggcggcgtagaggcgtgagaattcatcgataaggatattcagcgaccagccgtcggcgatgatgtggtgcagggtcaccaacagttggtggtcttcatcgtccaggcgcaccagggtcacccacagcagcgggcctttttccaggtcgaactgggtgcgcgcttcgtcttcgcggatctgttgcgcacggccttcacgctcggctgcgggcaggtcgctgaggtcgatgatctgcaggtcgaaatcggccttggcagcgatccgctggaaagcctggccgtcgcgttcgtagaagcgcgtgcgcagggcttcgtggcgctggatcaactgctggaagcttgcgcgcaccgcgtcttcgtctaactcaccgcgcaggcgcagggcaccagggatggtgtaggcgctgctctgcgggtccagttgccaggtgatccacaggcggttctgtgccagggattggggcagttcctcgtgacgggacaggtggtggatcacgccttgggcgacgccgccatcctgctgcaattgcgcgacagtcgcggcaaaaccttgcagggtcggcgcttcgaacagcaggcgcaggctcagctccaggccaagggtttcacgcaggcgcgcgaccacttgggtggcgctgatggagttaccgccgagcaggaagaagtggtcatcggccgcaacggtcgcgacctgcaactgttcgcaccagatcgcggcgatctggttttgcaggtcggattccagcgccccagtgcgcgcctgcgcttgcagatcggggaactgcgcatagcggtcgaggctgccgtccttgtgacgaagcgcacacgccgcgcgttgcaccttgccgctggaagtcttcggcaacgcgccggggttgagcagtaccaccacgctcggcgcctcctggtacgcctcggcgacggcctggcggatcgccttgatcagcgcttcgggcggcaggattttctgcacgctgcggctgatttcggcggcaatgccgatgccttccaggccctgatcattcaccgcaaacgcggcgacccggcctttgcgcaccacttcgacttcgcgttcgatggtctgctcgatgtcctgcgggtacaggttgtggccgcgcacgatcagcaggtccttgaggcggccggtgatgtacacctcgccgtcccggataaaccctaggtcgccagtgcgcagccaggtacggccggcgtgttgcacgaaggtcttggcggtggcctcgaggttgcgccagtagccgtgggcgatgctcgggccgctggcccagagttcgccgacgtggttgtcgggcagttcggcgaggctgtgcgggtcagcgatcagcacagcgtgttcaggctggctggtgccgcaactcatgatcgcactgccctgccccggctcggcgcggttggcggccagggcctgctcgtcgacgcgcagcgcgggaatgccatggccacgagtgccaccggcgacaaacagggttgcttcggccaggccgtaggaggcgaagaaattattcggggtaaaaccacaggcggcgaacttctcggcgaagcgttccagggtgtcgatgcggatcggttcggagccggaatacgccacgcgccactggctcaggtccaggcgttccagggccgagtcgctgacccgctcactgcagaggcgataggcgaaatccggcccgccactgatggtgccgccgtattcgctgatcgcttccagccagcgcaatggccggccgagaaagtaggccggcgacatcagtacgcacggcacgccactgaagatcggttgcagcaggccgccgatcaggcccatgtcgtggtacagcggcagccagctgacgatcacgtcgtcggggtttaggtcgatgccgaaaccgcgccggatcagcacttcgttggccaccaggttgccgtggctgacttgcacccccttgggcagcgcggtggagccggaggtgtattgcaggaaggcgatgtcatcggggtgcaggtcgggggcggtccagtcgccagcgctctgcaaggtatcgacgctcaggaccggcggcgcgttgtcgatctgcgccaggccatcggcgagactggcgatggtcagcaacaggcgcggctcggcatcgctgatgatcgacagcaggcgctcctggtgatggcggcgggtggactccggcggatacgccggcaccgcgatcacccccgcatacaggcaaccaaagaacgccgcgacataatccgcgccgctggggaacaacaacaccgcgcggtcgcccagttcggcattggcctgcaacgcagcggcaatggtgcgggcgcgcaggtcgaggtcgcggtaactgagcacaacgctgtgctcggcggattcggcgaggaagcgcagggcaacctggtccggggtctgcgcggcacgacattgaagggactggaccagggtgcggggaagttcgaaggcgtccatcatggggttcctgcctgaaatcggcttacgggaaattcaacaattcggggggggttgttcagccgacggcgagtggccgcgccgcgtcgttgcgccagcgggccaggtgttcgtcggcgtagcgccgcacgcagcgcagcacggcgctttcgtgttgcacgaggaagaagtggtggccgtcgaacatgtccagggaaaagccgctggcggcgtcgagttgccagtcgagcaactggtcggcgcgcacgctgtcctgcttgccgccgaacacatggatcggcatgcgcagcggcgcacgctcgccgtaggtgaagctgccgcacagcaggaaatcggcacgcaggatcggcagcatcaactgcatcaactcggggttggccagggcttcttcggtggtgccttgcagttcgcgcaagcgggcaatcagttggtcgtcggtcttttcgatggcgtactcgctgacatcacgacgggctggcccgggtgtgccggaggcgaacaaggcgagcggcgccggcacaccacgagcgttcaaggcatgggccaattcgaaggcgagcaggccgccgaggctgtggccgaacagggcatagggaccgttcagatcgcggctgatttcatcggcgagctgcgcggccagggccttgatatcgcgttgcaacggctcgtccatgcgcatgccacggccgggcaattccagcgggcatacctgcaaccactcaggcagcgcccggcgccaacgcgcatacaccatggcgctggcgcccgaatagggcaggcagaacagccgcagtcgagtcagcgtactcatcgagtgacgactccaaactgaaacacgctgtatgcacgatagaaacccatttcgtcctcctgcgggtgctgatccttggccgttttactaacggacctgtcacccagaagaacggacggcaccggcaaataattagtcgccgggtacaagcgagacgtggttcacaccgaacaagaaagcataagattagttcgtcttctcatttgacaatcattatcattcagcataatttgttgcccgatgtgtaggaggccccggcaaggacgccctcccctaacctcttttgcgacaaggtgatttccatgacggaacaagtatccacaggcaggtgcgactcaccgcttctccaggcattcgtcgataaccggctgattctggtgaagatcgcggcccgcattaccggctgccgctcccgcgccgaggatgtagtgcaggacgcctacttccggctgcaatcggcgccgacgatcacctcatcgttcaaggcgcaattgagttatctgttccagatcgtgcgcaacctggccatcgatcactaccgcaagcaggccctggagctgaaatactccgggacggaagaggaaggcttgaatgtggttattcacggcgcttcaccggaaacctcgcacatcaatttcaacaccctggaaaacatcgccgacgccctgacggagctgccccagcgcacccgctatgcgttcgagatgtaccgcctgcacggcgtgccgcaaaaggacatcgccaaggaactgggcgtatcgccgaccctggtgaacttcatgatccgtgatgcgctggtgcactgccgcaaggtgtcgggcagccatagcgatacgtttgcgcgcagggtttgacacacctgagactcagggtgggagggggcttgcccccgattgcatggggccaatcaccggtgttgtgactgcacagatgccatcgggggcaagccccctcccacatgtggttcggtggtatgcctgtcagtccgcgggcatcacatcaatgcgatacggctcgaaaatcttcagcatctcgccatcgtcgcgcaaacgcttgagcaacgcggcaaacgcgtcccccgtgatcggcgctttcgggcgcaacaacgcgtagtggtgatacacctggtcgatgcgctccgagaccaggaactgccccgccatctgcgcattgcgcaccatgaaatcactcaggtacgagcgcgtcaccaaggcgatatcggcacgcccgcgcgcgaccatcagcaggttgctgtcatgggagtaggtcaacgtggcgttgaagtgctcggccatgtacttggggtcggggttgaagttggcgaaggcgtagtgataaccgctgaacaccgccaggcgtttacctctcaggtcagcgaaataactttggtcacgaccgggctcacgctgggcgacgaagatttccgcatcttccaggcccatgtcgaccgacgtgtgggcaatctcctgccagccccaggcagggttttcgaagatcgccatatccacgcggccctgctcgaaatcgcgaaaacgtcgcgggatggaggtgggcaccaagacaaattggtagtcggtttgcgcggcgttcagggcttcgaccagttgcggcagcaaaccggtgtcggcaccctgctccggtcgcacagtgtagggtgggaaatgcgccgcgccgatgcgtaccaattgcgcagccgaagccggcatccaccacgcggtgcccagtgcccaaaaggtaagtcctgcagccagccgccatggcgaaaacatcaaggcacgcaccgttcaaaaacgctcatggcgataagctaggcgtttttgtctggagagacaactttccagcggtaaattaatagcttgcgcctcaatcggccttcaaaaccatcagcagggcttcttcggccaactgctccagcgtcaggctgccctcggcgcgaaaccaggtggtggtccaggacagtgcgccggtgaggaaacgccgcgtgataaatacatccccacggatgtagcccgcatccttggcctcccccagcacttgcagccagagcgcctcgtacacatcgcgcagggccagcacctgggcctggccttcggccgacaacgaacgccactcgtacaccagcaccgccatggcctcgccgctgccgcccatgatcgactgcaattcgcagcggatcagcgccagcacgcgttcgcgcacgttgctcgcctcttccagcgaagcgcgcatcatcgcggtgttgtagtggatggtttcttccatcactgcgcgcaggatctcgtccttgctcttgaagtgatgaaagatactgccggactggatgcccacggcgctggccaggtcgcgcacggtggtacgttcgaagcccttgttgcgaaacagatgggccgcggtttgcagcagcttgccccgggcactgtcggggtcggtcaattgcccgccatcgaccatggtgcgcatgacccgcagggctttgtgctcatccatgcctctctcctctacttccacggacgtcttggcccgcaatttaggccgtggcggccacccaagcaagcgcttggctgaaacttgtatccgcagtttacaaaccaagcgcttgcttggtagtctcgaccccagccattcgaggaaggatttctcatgagcaagacggttcgtatcggctgtgccagcgccttctggggcgacacctgcaccgccgccgcccaattggtgcagggcggccagctggattacctggtgttcgactacctggcggaagtcacgatgtcgatcctggccggtgcgcggatgaaagatccccagaccggctatgccacggatttcgtcgaagtgctcacgccgctgctggccgatatccagcaccagggcattcgcgtgatcagcaacgccggtggcatcaacccccaagcctgcgccaccgccctgcaaacggcctgcgacaaagccgatattcccttgaaaatcgccgtgttgctgggcgacgacctgcaaccccaactcaaacacctgcatggcatcaccgacatgttcaacggcagcccactgccgccgttgtgcgtgtccgccaacgcctacctgggcgcacccggcatcagccaggcgctgaagctgggcgcggatatcgtcatcaccggccgcgtggtggacagcgcagtggtcagcgcggcgctggtgcatgaattcgactggtcctggcaggattacgaccgcctcgcccaggccgcactggccgggcatatcatcgaatgcggcgcgcaatgcaccggaggtaacttcaccgattggcgcgacgtaccggactacgagcacatcggctttcccatcgtcgaagtcagcgccgacggccaattcaccgtcaacaaggtcgacggtacaggcggcttgatcagcgaactcagcgtcgccgaacaactgctgtatgaaatcggcgacccgcacgcctacctgttgcccgatgtgatctgcgatttcagccaggtcaaattgcagcagcaaggcaacaaccaggtacgcctgcacggcgccaagggcttgccacctaccgaccagtacaaggtcagcgccacttacccggacggtttccgctgcaccgccagttgcctgattgccgggatcgacgcggtcgccaaggccgagcgggtcagccaggcgatcatcaacaagacctcggaactattcagccagcgcggctgggcgccttacaccgaagtgaacatcgaattgctcggcagcgaagccacctacggcgcccacgccaggcgccaggactgccgcgaagtggtggtgaaactggcggtgcgtcaccccaacaaacacgcactggtgctgttcgcccgtgagattgcccaagccgcgaccggcatggcgccgggcctgaccggcatcgtcggcggacggccgacggtgtacccgttgatccgactgttttcgttcctgatcgataaaacggcctgtgacctggccatcgacttccagggcgagcgccacccctgcgcactgccacctgccgacaccccgcgcctgcccgatgcgtccatcgatccgcccaagccccaaggtcgcgccgacgccagcgtgccattggtgaaactggccgtggcgcgctccggcgacaagggcaaccacagcaatatcggcgtgatcgcccgccatcccgactacctgccatggatcgccgaagcactcaccccgccagtgatcgtcgactggatgggccatgtgctcgaccctgtgcacggccgcgtcgagcgctggtatctgcccggcagccacagcctcaacttcctgctggaaaacgcgctgggcggcggtggcatcgccagcctgcgcatcgacccgcagggcaaagccttcgcccagcaactgctggatatcccgattgccgtgccgcaacacattgccgatcaactcgcataacaggagcgttgccgtggccttcgactcgatcttcaaagccaacctgttccaggggcaaaccgtgatagtcaccggtggtggcagcggcattggccgttgcactgcccatgaactggcggccctaggcgctcacgtgatcctggtgggacgcaaggcagacaaactgcagaacgtcgcgatagagattgccgaagacggcggcaacgccgattggcaggtgtgcgacatccgcgatgaagaggcggtcaaggcgctggtcaaacacatcctgcatgcgcacggtccgatccatggcctggtcaacaatgcgggcggtcagtacccctcgccactggccgcaatcaaccagaaaggcttcgaaaccgtactgcgcaccaacctggtcggcggtttcctggtggcgcgggaagtgttcaaccaatccatgagcaagcacggcggcgccatcgtcaacatgctcgccgacatgtggggcggcatgcccggcatgggccactcgggggcggcacggtcgggcatggacaacttcaccaagaccgccgcgttcgagtggggctatgccggcgtgcgggtcaacgccgtggcgccgggctggatcgcctccagcggcatggacacctacgaaggcgcgttcaaggcggtgattcccacgctgcgcgaacatgtgccgctcaagcgcatcggcaccgagtcggaagtcagcgcggccatcgtgttcctgctcagccccgccgctgcctttatcagcggcagcacactgcgcatcgacggcgccgccagcctgggcagccgcgcctggccgttgcacaaggcgcaggcgccgagcgaacccttcaacggcttccaccgcgcctacttgccggatgtgctcaaggcggagcaatagagcatgccagtgattgaatccctgatcgacgcccacagcgcccaattcgcgcaaaaccgcgaagccatgctggccgccatcgcccaactgcgtcaactggaagacaccctgctgagcaaggcgcaggacgccaagcccaagttcgacaagcgcggccaactgctgccccgcgaacgcctcaacctgctgctggacccgggtgcgccgttcctcgaactggccagcctggccggctacaagctgcacgacgacaaggacggcagcgccgccggtggtgggttgatcgccggcatcggctacgtcagcggcgtgcgcatgctggtggtggccaataacagcgcgatcaagggcggcaccatttcccccaccggcctgaagaaatccctgcgcctgcaacaaatcgccatggagaacaaactgccagtggtgaccctcgccgaaagcggcggtgcaaacctcaactatgctgccgagatcttcgtcgaaggtgcgcgcagcttcgccaaccaggcgcgcatgtcggccatgggcctgccgcagatcaccgtggtgcatggctcggccacggccggcggcgcgtatcaaccggggttgtcggattacgtggtggtggtgcgcggccgcgccaaactgttcctcgccggcccgccgttgctcaaggccgcgaccggcgaagtggcgaccgatgaagaactgggcggtgccgagatgcacgcacaaaccgccggcaccgccgaatacctggcggaaaacgatgcggacggcgtgcgcatcgcgcgcgaaattgtcggcctgttgccctggaatgatcgcctgccacagacgccgaaacgtgcctacgcagaaccgctgtaccccatcgaagagctgctgggcctgatcccggacgacccgaaaaaaccctacgacgtccgcgaaatcctcgcgcgcctggccgacggctcgcacttcctcgagttcaagggcgagttcgacgcccacaccgtctgcggccacatgcacctccagggccgcgccgtcggcgtgatcggcaacaacggccctatcacaccgaagggggcgagcaaggccgcgcaatttatccaactgtgcgaccagagccgcacgccgctactgttcctgcacaacaccaccggcttcatggtgggcaccgagtcggagcagcaaggcgtgatcaagcacggcgcgaagatgatccaggcggtggccaatgcacgggtgcctaaactgaccattgtggtcggcggttcctacggtgccggtaactatgcgatgtgcggtcgcggcctggacccgcgctttatcttcgcctggcccaacagccgcacggcggtgatgggcggtgcccaggccggcaaggtgctgcgcatcgtgacagaggccaagcaattgaaggacggcctggtgccggaccccaaggtgctggacatgctggaacaggtcactgcgcagaagctcgacagccagtccaccgcgctgtatggcagcgcgaacctgtgggacgacgggctgattgaccctcgggatacacggaccttgctcggttttctgctggatatttgtcatgaggctgaggtgcggccattgcagcccaacagctttggtgtggcgcgcttctaatcaggagaacaataaaaatgatcttcacccaagaacaccaggaactgcgccgcagcgtccgcgccttcgtcgaccgcgagatcaacccccatgtggacgaatgggaaaaggccgggcgctttcccatccacgatattttccgcaaggccggtgaactcggcctgctgggcatctccaaaccggagaagttcggcggcatgggcctggactacagctactccattgtcgccgccgaagagttcggcaccgtccgttgcggcggcattcccatgtccatcggcgtgcagaccgacatgtgcacaccggccctcgcccgcttcggctccgatgcactgcgcgaagaattcctgcgtccggccatcagcggcgagcaggtcggctgcatcggcgtctcggaaaccgccgccggttccgacgtggccgggttgaagacccatgcgcgcaaggacggcaacgactacgtgatcaacggcagcaagatgtggatcaccaactcgcccagcgccgacttcatctgcctgctggccaacacctccgatgacaagccgcacatcaacaagtcgctgatcatggtgccgatgaacacccccggcatcagcgtcagcccgcccctggaaaagctcggcatgcacagctccgagaccgcccaggtgtttttcgacggcgtgcgcgtgccgcaacgcaaccgcatcggccacgaaggtgcggggttcatgatgcagatgctgcaattccaggaagaacgcctgtttggcgcggccaatatgatcaagggcctggagcattgcatcgacagcaccatcgagtactgcaaggagcgccagacctttggcaaggcgctgatcgacaatcaggtcattcactttcgcctggccgaactctccaccgaaatcgaatgcctgcgtgcgctggtctaccaggccaccgagcagtacatcaaaggccaggacgtgacgcgcctggcgtccatggccaagctcaaggcggggcgcctgggccgcgaagtcagcgacagttgcctgcaatactggggcggcatgggcttcatgtgggacaaccctgtggcccgcgcctatcgcgatgtgcggctggtgtcgatcggcggcggcgccgatgaaatcatgctgggcatcatctgcaagttgatgggcaccttgccggggaaaaaaccatgaacaccttgttgctcgaaccccacaacggcgtgctgcacatcaccctcaaccggcccgactgccgcaatgcgatgagcctggagatggtcaatgaactgcgcgcggtgttggcgcagttggatgtccagacgcgcgcggtagtgatcagcggcgccggcggacatttctgcgccggggcggatgtgaaggacctagtcacggcgggcaatcaactgcaggcgctgaaccgggcgtttggcacgttgctgcaagaagtcgaagcgctgtcgcaagtggtgatcgtcgtgctgcaaggcgcggtgctgggcggtgggtttgggttggcgtgcgtgagcgatatcgccatcgccgatcaccaggcgcaattcggcttgccggagaccagcctgggcttgctgcccgcgcagattgcaccgtttgtggtcaagcgcatcgggctgacccaggcacggcggctggcgctgacggcggcacggtttgatgggcttgaagctgagcggctgggggtggtgcactttaccgagcgcgacccgcaggcgttggcgcagcggttggatgacgtgctggggcaagtgctgaagtgtgcgccgggggcgaatgggcgtactaaagcgctgttgctggccagtgtggatgaaccgctggaggcggtgctggatcggggcgcgcagtggtttgccgaggcggtgcgcagtgaggaagggattgaggggacgcaggcgtttgtacagaaaagaaagcctcggtggtgcaaatgacgccatcgggggcaagccccctcccacactgtgggagnnnnnntgcccccgatagcggtagttcagttaatgatgtgttaactgatactcggctatcgggggcaagccccctcccacatgagtcctaccgttttatttggtgcgggtctcatgcatccgcgccaactgccgctccagcatcgacggatagggctccatcaaccgctccacacaactggcaccctcagggctggcaatcgggcggatacgtgcgcgttggcggatcagcgtgtcttcactgatcttgcgctccaccagcagcaggttgcggctgtgttgggacaaggccagggcatcctgggcgatctcggtgagcaacaggtcgatctggcttatgccgaacagatcgtcgcccactgtcaggccaagctgcagttgcagggtaatgccgctgtctgccacttcgatctgcagttcatgacccagggcgcgcagcagttcgccgcagcaaatggcgttggtcaggtagtcttcaccactgtcttcgctgtggaacagcatcagcgtgctgccatcgttcagagtgtgcagttcgctctggtacaacgaggcggcctggtcgaggcagtcacggtagcgttccagcaattcggtcaggcgtgcgcgtggcaggcgacgcagttgatcctgcgcacccagttgcaccgccagaacggcgctgtactgcggttccgcactctttaccggagccggtttggcggcgacggccggcgcgctggccgaggtgtcgcgcaggtcggcgaacgggtcttcgtcgtccagctcgtcttcttcagctttgaacgcctggcgggtggcaggttttaggcccgctaccggcgcgtctcccacttcaaactcaggctcatcgtcgaactcaggttctggctcaatctcgcgcaccaccggttccggggcgaagctggcgtgaagttggcgagcgaggtcgcctatttcgtcctggcgatcagtggccggggtatgttcgtcgatgtcccgcagccagatgcgcagttgcatcaagggcgtagagatatgccgtcccaggcgcaggctcagggccagggccaatgccagcaggatcgcgctgagaatgcccatgctttgcaggctgatggtcatcggctgctggaattgctgcatgtcgaggctgatgcgcagttggccggccttcacatcctgaaaggtgatattgctcgaatacaggccttcggcctcacccagcaggccgtttttcgggcgttgcccggcttcggccatgatccggttgtccacgctgtagatggcggcgtgggccaccagcgggttcttggtcaggttgttgagcagcacgttgaggctgaggatgtcgttggacaccagcaactcagtcgccgaggtggcggtctgtgtggtcaggctctcgcccagggcgtcggcttgttcgtgcatggcctgtttgaactgcaatcccatcacgcaggcatagatcaccagggccagggcgaccaggatcacgttatggctggcgatgcgtaatgcgatcggtacacggcggtggcgcagtgcccggaagatcagcaggaagaagttatcggtttttactggcgtgggccggttcacttgcgctcggctcttggtccgtgaagttgacgcgcagtatagcgacagccccatgaccggcaaagcgctggctgtgcccgatggtcactgaaagtgggtagaatgcggtttttttccagcctgggggtgcgccttgcgcgaaattgtcctgattaacatcactggggaagaccgcccgggtctgaccgcagccattaccggcgttctggcccagggtggtgtgaacattctcgacatcggccaggcggtgatccacgacaccttgtcgttcggcatcctggtcgaaatcccgagcaccgagcaggcgtcttcggtgctcaaggacatcctgtttacggcgtacaagctggaccaacaggtgcgtttcaccccggtgtccgaagccgattaccagcaatgggtggccggccagggcaaaaaacgccacatcgtcacgctgctgacccgcaaggtcaccgccgagcaactgcagcgtgtcagctccattaccgcgcaatatggcctgaatatcgaccatatcgaccgtttgtcgggtcgtatgccattggacacgccggccgacaagggcaagggctgcatcgagttctccgtgcgcggcgaaccggccgacccgcaggccctgcgtgccgagttcctcagcgtggcccaggagctgaacgtcgatatcgccttccaggaagactcactgttccgccgcaaccgccgcctggcagtgttcgacatggactcgacgctgatcgaggctgaggtcatcgacgagctggccaaggctgcgggtgttggcgagcaggtctcggaaatcaccgagcgcgccatggccggtgaactcgacttccgcgccagcttcaaggagcgcctggcgctgctcaagggcctggacgtgagcgtgctggacgccatcggcgcttccctgcgcctgaccgaaggtgcagagaccctgttcgccgagctcaagcgcctcggttacaagaccgccatcctgtcgggcggcttcacctatttcgccaagcaattgcaggctaaattaggcatcgactatgtgttcgccaatgagctggaagtggtggatggcaaggtgaccggtgtggcggtggagccgattgtcgacgcccagcgcaaagccgatctgctgaaggaattggcccacaaggaagggttgcgtctggagcagactattgcggtcggcgacggtgcgaatgacttgccgatgttggcaatcgcggggttgggcgtggcgttccgggccaaaccgttggtgaagcagtcggccaagcaggcgatttcgacattggggctggacggggtgttgtacctgttgggtttccgcgaccgcgatgggcagctgtaactgaagaaacgcagttcaaaaatgtgggagggggcttgcccccgattgcggtggatcagtcaacaaatctctgactggactgccgctatcgggggcaagccccctcccacatttgaccttcactgaattcaaatcaggctttcggcagtgcgatgccttggcccatctgcaccggcgtacccgccgccagttcttctgcccacttcacctgatccggcccgaacagcacaatcgccgtcgagcccagcttgaagcgacccaactcggcacctttttccaggtggatcggcgcacgtgcagcttcgtcgtagcggaaggttttcagctcacgcttcggcggtgtcaccagcccggcccacacggtttcaatcgacgccacaatcatcgcgcccaccaataccacggccatcgggccgcgttcggtgtcgaagatgcaggcagcgcgctcgttacgtgcaaacaactcgggtacgttttcagcggtggtctggttgaccgaaaagatgcgtccaggaatgtagaccatctcgcgcagcgtaccggccagcggcatgtgcacgcggtggtagtccttcggcgagaggtagatggtggcgaaatcaccgcccatgaacggcgccgctacggctgcatcgccacccagcagttccagcacgctgaagctgtggcctttggcctggaacacgcggccatgttcgatcggacccaactggctgaccgcaccatcggctgggctcagcaccgcgcctgcggtttgatccagcgggcgggcgccgtctttcagggcacgggtgaagaaggcgttgaagtgctcgtaagcggtgacgtcttctaccagggcctgggacatgtccacttgatagcgcttggcaaaccagctggtgaaggcgttcttgaaccaacgcacgcggcactcggcaatgcagccagccaggcgcgacagcaagtggtgcggcagcaagtactggctgaggataaacaactgctttttcataactgtccttaaaccttaaatctcgacgggggtgtcggggtggttgccccattcgccccaggaaccggcataacctttgactcgcggataaccgagcgccttggccaccaggtaggtgaagccagagcggtggtgagtctggcagtgggtgatgatttctttgtcgcgggtcagcccgaggtcttcgaggatctgtggcatgtcacggcggatgcgcaggttgcgcgccttgtccatgccggccgtccattcgaagttcaccgcgccgggaatgtgtccgcctttggcggcgaggaccttctcgccggagtactccagcgggccacgtgcatcccagatgcccaggtcggcagcacccaggcggctttgcaggtattcacgggtagcggtggggccatcatgcagcgtgagactgaccgggccaccgacaggtgcgggcacgtcggtggagaccgggcgttgttcttccagccaggccagcaggccgccatccaggtagtggtatttctggtggccgatcacgtcgagcatccagataaagcgcccggcccagccgccgccttcgtcgtcgtagaccacgtaggtcgcatccggggtatggcccagttcgccgaacagtttttccaggtcggccttggtgggcagcaggccgggtgccggcggctggcccagttgggtgcgtttggggtcaacgaaatgcgcgccggggatatgcccttcggcgtagcgggcggcgctggtgaggtccaccagaatcaggtgctcggcaccgaggcggccttgcaggtcgctggactcgatcaccagcggcaagccagagaagtcaggcatgtgaggtctcctgggcacaaatgttggcgataaaagacggcgattgtagcgcaagcatcaggcgctgcggttggtaaagcagtgcagggctttttcgatgcattgggcggttttgccgaaggcctgcacggtggtttccgagaacggcccgccaccctggtcggccaccatcagcatcaccaccttgccattgcaactcagggagcgcagcagcagatgttcgccggtgaacaggcggcgcaggatcggcggcagcaaggctgagaactgggcatggttctcggggttgagacgcacctgggcggacttttccagcagacgttgcagcagggtgctgttgaccacgtccaggctcaggttggcggcgtccttgggcaggccatcgacctggtgcacgcgcaaggtactcaaggcgcgatcggccatcagcagcatgacccgctgcatgccactggcgaccaaggcctctttggcgcacgtggtcaggtgcatcgcgttggcaaagcggctcggttccaccaagagttcagtgcagcgcttgcgccacacggccagggcctcggcggtgggcggtggcgccggcagcaggccgcgatgaatcttcgccacatgccacggccagatcagcgacagcgccgggtgccagaggtcgggcatcagggtggtacgggcactggtgacggcttgctggtggaccagttgctgcacctcgcccaacggttgttgcaggtacagcgctgtgagcaactgccagcgttcggtgtgcgggcaggtccaggattcctgggccgacatcgccaggccgttggccagcaacacggtattggccggctggttcagccagcgccgcaggttgggttcggcgtcgagcaattgctgatggcgcagtgggtcgtcctcacgggcgatatgcagggccttgaccagcaggcgctgctcgctcatcagcaacttatagccctgggacacccagatcggcaggtgccaggcttcggtcaggccgacgcacaggtcgagcaggcgtatgccgaacagttcctgctcgaccgcgcgggctgactggcccttgtggataacccgcagctcccactcctccagaagcttggggtaggccaccgccatcggccacagtggcgacaggaacaacaggctgccccagtggatgtcctgccacagccgcgccaggcgactgccgaacaaaccgttggcctgctgcgacgcgtgctggctgaccagcaacagttggcgcaatgccacggggatctcgtgtgcgggcaccgagggcaggcgcgccagcaattcttcggcgcgcttgaggcccaggcgattgagcgccacctcgaggttttccgccggttccgccaggctgccatgggtgtggctgttggcctcgcgcatcacgctgagcaccagggccgggctgttttgcatcagctcggcaatatcccgcaacgaactgcggttatcacggatgcctttgcacacgcggtcgtggctggcctggggaacgggcagcagcacatcgtccaggcgcttgatccaagcggcgagagagttgggttttgcagttgggactgtcgtttcattagccatgattggggcgcgatcatcacttgcggtctacacgcccggagcgggccgaactggcttttcgccttaacgggctatagtctggcgcagttttgccgataagtagaacaagagttttctgctacacccaatatgtccatgaacccgacggcgcaagtactcatctcctatggctaaaattatcggcatcatcgtcgtcttcgcaagcgtgctcggcgggtacgtcctgtcccacggtaaaatcgctgcgctgatccagcctttcgaggtgatgatcatcggcggtgcggcactgggtgcattcctgcaggcgaaccccggctacatgaccatgcacgtgatcaagaagtcgctgggcatgttcggttcgcgcttcacccataccttctacctggaggtgttgggcctggtctacgagatcctcaacaagagccgccgcgaaggcatgatggccatcgaggccgacatcgaagacgccgccgccagcccgattttcgccaagtacccggccgtgctcaaagatgagcgcatgaccgcctacatctgtgactacctgcgcatcatgtcctccggcaacatggccccccacgagctggaaggcctgttcgacatggagttgttcagcctcaaggaagagctggagcacccctcccacgcggtgaccggcatcgctgatggtatgccgggtttcggtatcgtcgcggcggtactcggtatcgtggtgaccatggcatccctgggtgagggcgaccaggccgctatcggcatgcacgtgggtgcggcgctggtcggtaccttcttcggtattctcgcggcctatggcttcttcggcccgctggcgacttccctggcccatgacgccaaggaagaagtgaacctgtacgaatcgatcaaggccagcctggttgcttccgcttccggcatgccgccgtcgctggcggtggagttcggccgcaaagtgctgtaccccaagcatcgcccaagcttcgccgagctggaacaagcggttcgcggtcgctaagccatggaaaacaaccagccgataattatcaagcgcgtcaagcgcttcgctgcggggcaccatggtggcgcctggaaaatcgccttcgccgactttgcgacggcgatgatggcgttcttcctggtgctgtggctgatgtccaccgccacgccggaacagaagatcgccattgccggctacttcaaggacccgattggtttctcggaaagcggcacgcccttcgtgatcgacctgggcggctcgccgcagttggcgcctgagcgcaccatcaacccggaggtcaagaccgaagcgcctcaggaaaaaatcccgatcgagcgcgatactgtcgagtctatggccgaacaggtcgagcaggagcgtcttgaactgttgctgcaagaactgcagaccaaggttgaggaaaacccgcaactgttgaagttcaaggatcagatttcattcgagatcaccccggacggcttgcgcatccagatcaccgacgcagccaaccgcccgatgttcgactccggcagtgcgcgcttgaagccgtactttgaagacatcctgctggccatggccgacaccatcaaggcggtgccgaacaagatcagcatcagtggccacaccgacgccaagccttacgcaggccagggtgacttcggtaactgggagctttcggccaaccgcgccaacgctgcacgtcgtgcgctggtggccggcagctacccggacccgcaagtggcgcgcgtggtagggtttgcatcgtcgcagctgtttgaccccaaggacccgttcaaccccatcaaccgccgtatcgatatcgtggtgctgaccaaaaaggcccaacgtgcgatcgaaggtgaccagcccccagcggcgcaacctactccgggggccggcgcgccgggtgaagtaccggccgatccgaacgcgattccgccaggacaggagccgttgccggcgcatgagctgcgtcagaagctgaacctgtttgatgacggtggggtgaaggatcctacggtgcctaagacgggttcttaagcaactaaggtctttttgtggtgagcgggcttgtcccgcgttgggctgcgaagcggccctgatccaaacgccgcatttcttccaggtaaaccgcgtcatcaggcttcggggctgctgcgcagcccaacgcgggacaagcccgctcgccacaatgttgtctgtgcggctcaataactgctttcgggcaagctcgcaataatcgaccgatagctgttcatccgctgttgctgcacgcgcccatcttccagggccttgagcaacgcacagcccggttcgcggtcgtgtttgcagtcgcggaagcggcaggtgccgatcaggtcgttgaattcgataaagcccgcttcgacatcgcagcggctgacgtggccgaggccgaattcgcggatgccgggggagtcgatcaactcgccgccgccggggaagtggaacaaccgtgcggtggtggtggtgtgggtgccctggccggacagttccgacagtgggcctacgcgggtgtcgacttccggcagcaggctgttgaccagcgaagatttacctacgccggactggcccacgaacacgctgatgcgtccgtccaactgctgttgcagctgttccatgccattaccgtgatgcgccgaaacctccagcacggggtagccgagggtgcggtacaccgccagtaacgcgttgagcgccggggcattctgctcgtcgatcaggtcgaatttgttcagcagcaacagcgggcggatgccggcatgctcggccgccaccaggtagcggtcgatcaggttggcatggggctcgggcagtggcgcaaacacgatcacgatcatgtcgacgttggcggctaccggcttgagctggccccggctatccgggcggcgcagttcggtggtgcgcggcagttgggcgacgatcacgccgatgccctggttgccggcacgccacacaaccttgtcgcctgtgaccagcgccggcaggttggcgcgcaagtggcagcggaacacctggcctgcgagttcgccttcgagcgcctcgacttcgacctgcacgccgaagtgcgcgatcaccaggcctgtttgttcagggccgaggtcgccgccctcgagcgcttccacggcggaggattcacgtttggcggcgcgcgcggcgcgttcaccctgaatcttttcgatgcgccagttttggcgacggttgagctggcgtttggccattggtgttccgtgtcgataatgcaaaggttgggtaaaacggtcgcgagtctagcacggccccgcctgctaaactgcgcagctacgccaaggtgccaagagaatcaaaccatgcaaaacccacagaacctgatttggatcgatctggaaatgaccggcctgaaccctgacaccgacgtcatcatcgagatggccaccattgtcaccgacagcaacctcaacaccttggccgaaggtccggtgatcgccatccaccacagcgacgccgtgctcggcaccatggacgagtggaacacccgcacccacggcaactccggcctgacccagcgcgtgcgtgacagccgcgtcagcatggccgaagccgaagccgaaaccatcgccttcctggaaaagtgggtgcccaagggcaagtcgccgatctgcggcaacagcatctgccaggatcgccgcttcctctatacgcatatgaaagcgctggaaagctacttccattaccgtaatctcgacgtatccaccttgaaagaactggctgcccgctgggcgccggaagtgaaggacagcttccataaaggcagcacgcacctggcgctggatgatatccgcgagtcgattgccgagctgcagcattaccgcaagcatttcatcaaggcctgaactccctcaatggtgagccggctcgccacagttttgcaaggatcgccctcatgctgctgatgctctacctcatcgccatcactgccgaagccatgaccggcgcgctgtccgccgggcggcgaggtatggactggtttggtgtggtgctgatcgcctgcgtgacggcgctgggtggcgggtcggtgcgcgatgtgctgctggggcattacccgctgacctgggtcaagcacccggaatacctggtgctgacctccgtcgccgcgctggtgacgatctttatcgcgccgctgatgcgccgcctgcgttcgttgttcctggcattggacgccctgggcctggtggccttcaccctgatcggcagcatgactgccctggaaatgggccatggcatgctggtggcgtcggtcagcggcgtaatcaccggcgttttcggtggcatcctgcgggatatcttctgcaacgacatcccgctgatcttccgccgtgagctgtacgccagcgtgtcgttcctggccgcctggttctacatgctgtgcctttatcttgagctgcccagtgagcaatcgatcctgctgacgctgttcagcggctttctactgcgcttgctggcgatccgtttccactgggaaatgcccaagttcgtctacaacgacgacgtgcactagcgcgtcgcgtgctggttcagcgcccattccacatgttcgcgcaccaggtccgagggatattcccgccgcgccttcaaggcttccagcaccggaatgcttgatggtgcgttgcccaggcccaccgccaggttgcgcaaccagcgctcatagccggcgcggcgcaggggtgaaccttcggtgctgctgaggaatttatcctcgtcccacataaacaactcggccagttcggcgttatccaggttgtggcgtggcttgaaatcgctttcggtggtggcgcgggcgaaacgattccatgggcaaacgatctgacagtcatcgcaaccgaacacgcggttgccgatcaacgggcgcaggtcttcggggatcgcgttcttgagctcgatggtcaggtaggaaatgcagcgccgggcatccagcacgtaggggcctacaaaggcattggtggggcagatgtccaggcacgcggtgcagcgcccgcaatgttcggtgctgtggggggcatcgactggcagcggcaggtcgacaaacaactcgctcaggaagaagtagctgcccgccttgcgattgagcaccagggtgttcttgccgatccagcccagcccggctttttcggcgatggctttttccagcaccggtgcgctgtcgacgaaggcgcggaagccgaacgggccgatctgcgcctggatgcggtcggccagttgctgcacgcgcttgcggatcagcttgtggtaatcgcggcccagggcgtaacgcgagatataggctttttccggtttggccagcagttgcgccatttgtgtgtcgccgggcaggtaatccatgcgcagcgagactacgcgcaaggtgccgggcaccaactcctccggatgggagcgtttgctgccatgggcgcccatgtaatccatctcgccctggtaacccgcgtcgagccagcgttgcaggtgctgttcatgctcggccaggtccaggccgctgatgccgacttgctgaaagcccagctcgcggccccagtctttgatcgattgggcgagggcaggcagatcggtggtgatggcaggcatgagacaagggaaaccgcaggttagataggtataattctgccagacatcggagcttgaagacgcatgccgcagacaaaacacgcaataaccgacgtacaaccgctgttgcacggccatttgccgcaactcgctgcgcgttccccggacgcccataaaggccagttcggccacctgttggtcatcggcggtgaccgtggctttggcggcgccgcgctgctgagtgccgaaagcgccctgcgcagcggcgcgggcatggtgtccctggcgacgcgcctggaacatgtgcccgcggccctggcgcgcctgccggaagtcatgaccgttggggtgagctcggccaatcaattgatgggcctgctggaaaagatctcagtcatcgtgatcggacctggactcggtggtgcgtcctggggcaaaagcctgctttccgtcgccgccaacgccagcctgccgcaggtgtgggacgccgacgcgttgaatcagctcgccatcggcagtgtcactctgccggctgattgcgtgatcaccccgcatccgggggaggcggcgcgcttgttgggcgtgtcgacagccgaggttcaggccgatcgtcttaaggtggcgcgcgcgttgagccagaaattcaacgcagtggctattctcaagggcgcaggcagtttgattgccagcccggacgggcgcgtttcacgctgtgaccaaggccacccggcgatggccacggcagggctgggcgacgtgttggccggcctggtgggtgcactgctggcccaaggcatgcccgcctatgaggcaagctgcctggctgtgtggctgcacgcgacggcgggagatcgccaggggacgttcggtcgcgggttggccgccagtgatctgatccctgccattcgtcaattgctggaggagcagtcaccgtgtctgaagtaattcttttcctggccgatgaagaggccatggttgccttcggccagcgcatcgcccaggtcacggcgggagcggggctgatctttctcgaaggcgacctgggggcgggcaagaccacgctgtcgcgggggatcattcgcgggctgggccacacaggggcggtaaaaagcccgacgttcaccctggtagagccctacgaagtcggcgacgtgcgagcgttccatttcgacctctatcgcctggtcgatcccgaagaactggaatacatggggatccgggattacttcgacgaagatgcgctgtgcctgatcgagtggccagataaaggcacaggctttttgccaaagcctgacctgaccattaccattacgccgcatgagcatggacgtcagttgaagttgttgccccagagcgtgcgcggccagtcgtggtgcgcggctttggcattggaattcaaataattggtggggttaggtatgcgctttcgcgcgttggttgctgtcgtgggggtgttgcttgcggcaatgactgtcaatgctctggctgcttcacaggtgaagagtgttcgcctgtggcgagcgccggataatacgcgcctggtgttcgacctgtctggcccggtccagcacagcgtctttaccctgacgtcgcctgatcgcctggtgatcgatatcaacggcgcgaccctggccgcgccgttgaaagtctccaccaccaataccccgattaccgccatgcgctcggcccaacgcacgccgaccgatttgcgcgtggtcatcgacctgaaaaaggtcgtgaccccgaaaagcttctccctggcgcccaacgcccagtatggcaaccggctggtggtcgacctgttcgacaacgccgccgatgccgcgccgccgcctgcgcccaccccgagcgtggcaacggtgccggcggtgccggtcaacccgtcgcaaccgcaggtcaagctgccaccgccgccaccggccccggccggcaaacgcgacattattgttgtgatcgatgccggtcacggcggcgaagacccgggggcttccggctcgcgcggccagcatgaaaaagacgtggtacttgccatcgcccgcgagctgcagcgccaggtcaatggcatgaaaggctaccgtgccgagctgacccgtaccggcgactacttcattccgctgcgcggccgtaccgaaatcgcccgcaagaaaggcgccgacctgtttgtgtcgatccacgccgacgccgcgccttcggccgctgcctttggcgcttcggtgtttgccctgtcggatcgcggcgctacgtccgagaccgcgcgctggctggccgacagcgaaaaccgttccgacctgatcggcggcgccggcaacgtgtccctcgatgacaaggacaaaatgctcgccggcgtgctgctcgacctgtcgatgaccgcttcgctgacctccagcctgaacgtgggccagaaggtgctgagcaacatcggccgggtcacctcgctgcacaagcagcgtgtggaacaggccgggttcatggtgctgaaatcgccggatatcccctcgatcctggtggaaaccgggtttatctccaactccaacgaggcctcgaaactggccagcgccagtcaccagcaggcgctggcgcgttcgatcagcgccggtatccgccagttcttccagcagaacccgccgccgggcacctatatcgcctggctgcgtgactcggggaaaattgcccagggcccgcgtgaccatcgtgtgcagccgggcgacaccctggccatgctggcggtgcggttccaggtgtcggccgcgaccttgcgcagcgccaacaacctgaaaaccgatgaattgaaagtcggccaggtgttgaccatccccggcactgaattggcggcacaataatgagtgaatcactcctcgacagcggatcgcgcattgagctgctgagcccgcgccttgccaaccagattgccgccggcgaggtggtcgagcgcccggcgtcggtgatcaaggagctgctggaaaacagcatcgactccggcgccaagcgcattgatgtcgatgtggagcagggcggcgtcaagttgttgcgcgtgcgtgacgatggcagcggcatttccgccgatgacctgccgctggctctggcgcgccacgccaccagcaagattcgcgacctggaagaccttgagcgggtcatgagcctgggctttcgcggtgaggcgctggcttccatcagctccgtcgcccgcctgaccctgacctcccgcacccgcggcgccgaacaagcctggcaggtggaaaccgaaggccgcgacatggcacctcgggtgcagccagcggcgcatccggtcggcacttcggtggaggtgcgcgatctgttcttcaacaccccggcgcgacgcaaattcctcaaggctgaaaaaaccgaattcgatcacctgcaggaagtcatcaagcgcctggccctggcccgcttcgatgtagcgttccacctgcgccacaacggcaagaccatcctcagcctgcatgaagccaacgatgacgccgcgcgtgcgcgccgggtgtcggcgatttgtggggcgggcttcctggagcaggcgctgccgattgaaatcgagcgcaatggcttgcggttgtggggctgggtcgggttgccgacgttctcccgtagccaggcagacttgcagtacttctttgtgaacggccgcgcggtacgcgacaagctggtggcccacgcagtgcgccaggcgtatcgcgacgtgctgttcaacgggcgtcacccgacgttcgtgctgttctttgaggtcgacccctcggtggtggacgtcaacgtgcaccccaccaagcacgaagtgcgcttccgtgatggacgcatggtgcatgacttcctctatggcaccttgcaccgcaccctgggtgatgtgcgcccggatgatcaattgtccgcaccgattgtgacggcagtggtccgcccgagtggcccggaggccggtgaattcggccctcagggcgaaatgagcctggcggcgaacctgctgcaatcgccgcagtcgcagccgtcgtacaccgcgccgaatgccggctccggctcgggttatcagtaccaatacaccccgcgcccgcaatcggcggtgccggtggccgaagcccaggctgcgtatcgcgagttttttgcaccgctgccgggggctgagccgggggcgccggtcgccttaccggagggcggtggtgatattccaccgctgggttatgcgttggcgcagctcaagggcatctatatcctggcggagaacgcccacggcctggtgctggtggacatgcacgccgcccacgagcggatcatgtacgagcgcctcaagatcgcgatggccagcgaaggcctcagcgggcagccgctgctggtaccggaatccctggcagtcagccagcgtgaggccgattgcgccgaagagcatcacagcgtgttccagaagctgggctttgaattgcaacgcctgggcccggaaaccctggccatccgccagattcccgcgctgctcaagcaggctgaggccaaccggctggtggcagacgtgctggcagacctgatggagtacggcaccagtgaccgcatccaggcgcacatcaacgagctgctcggcaccatggcctgtcacggcgccatccgtgccaaccgccgcctggccctgccggaaatgaacggcttgctgcgcgatatggaaaacaccgagcgcagcgggcaatgcaaccatggccgaccgacctggacccagatgggcctggacgatctggacaaactgttcctgcgcggccgttgatgagtgccttgccccccgcgatcttcctgatgggccccacggccgccggcaagaccgacctggccatcgaactgaccaaggtgctgccgtgcgagctgatcagtgtcgactctgccctggttttccgggacatggacatcggcaccgccaagccttcgaaagagctgctggcccagcatccacaccggctgatcgacatcatcgacccgtccgagagctattcggctgcagattttcgcaccgatgcactcgccgccatggccgacatcaccgcgcggggcaatattccgctgctggtgggcggtacgatgctctactacaaggcgttgcaggaaggcctggcggacatgccgccggccgacgcccaggtgcgcgccgagcttgaagaagaggctgcacgccttggctggcaagccctgcacgaccagttggcggcggtcgacccggtctccgccgcacgcattcaccccaacgacccccagcgcctcacccgtgccctggaagtctggcgtgtgagtgggcagaccatgactgaacaccgcctgaaacaaagtgcgcaaagtgctgacgcaggcgcttcgggacagtcacaattgccctatactgtggcgaatctggccatcgctccggcaaatcgccaggtgctgcatgaacgaattgcacaaagattcacaattatgttggaacaggggtttgtggacgaggtcgtagctctgcgttccagaggtgacctgcatccagggttaccttcgatacgtgccgtaggctatcgccaagtctgggatcatctggatggcaagctgacgtcagccgaaatgcaggaacgcggcatcattgccacgcgccaattggcgaaacgccagttcacctggttgcgcagctggagcgatttgcactggctggacagcctggacagcgacaatctgtcacgcgccttgaaatacttgggaacggtctccatattgagctgagtccttgcaattgccgtctatccttgggggtgtgacggccataagctatctattttccgattttttattattgatccttaaaggagtgcggcacatgtcaaaagggcattcgctacaagacccttacttgaatactttacgtaaagagaaagtgggggtttccatctacctggtcaacggtatcaagctgcaaggcacgatcgagtcgttcgaccagttcgtgatcctgctgaaaaacaccgtcagccagatggtctacaagcacgctatctcgacagtcgttccagttcgtccaatccgtctgcctagcgcaacgggtgatgaacagggtgacgttgaggcaggtaacgcctgataggagtctcctttgttctttgagcgccacggtggtggtgagcgagtgatcctcgttcacttggatggacaggaccctgaggcgcgcgaagatccgcaggagtttcaggagttggcaaattcggccggcgccgagaccgttgcgttttttaacgtgccgcgtcatcggccaaccgccaaattcctgattggcagcggcaaggtcgaggaactgcgcgacctggtccacgccgaagaagccgatctggtgatcttcaatcacatcctcacgcccagtcaggaacgtaacctcgaacgtgtcttcgagtgtcgcgtgatcgaccgtaccggtctgattctcgatattttcgcccagcgcgcacgtacccatgaaggcaagctccaggtcgaactggcccagcttgaccacatgagcacccggctggtccgcggctggactcaccttgagcgccagggtggcggtatcggtatgcgtggcccgggtgaaacccagctcgaaaccgaccggcgcctgctgcgggttcgcctgcgccagatcaagggccgcctcgagaaagtgcgcagtcaacgcgagcaatcgcggcggggtcgttcccgcgcggatatcccaaccgtgtccctggtgggttataccaacgccggcaaatccacactgttcaacaacgtgacgaaatcggacgtgtacgcggccgaccaactgttcgccaccctcgacccgaccctgcgccgtctggaccttgacgacctggggccgattgtcctggccgataccgtgggtttcattcgtcacttgccgcacaagctggtcgaggcatttcggtctacgctcgaagagtcgagcaattccgacttgctcctgcacgtgatcgatgcggccgaaccggatcgtatgttgcagattgaacaggtgatgctggtgctgggcgagattggcgcccaggacttgccgatcctcgaggtctataacaaactcgatttgcttgaaggcgttgagccacaaatccagcgcgatgagaacggcaagccccagcgggtctggctgtcggcgcgtgatggcagtggtctcgagttgcttgaacaagcgattgccgagttgctcggcagcgatttgttcgttggcaccttgcgcttgccccagcgttttgctcgactgcgtgcacagtttttcgagttgggcgcggtacagaaagaagaacacgacgaagaaggtgtcagcttgctggccgttcgattgccgcgctcggagctgaatcggctggtcagccgtgaaggcgtggtaccgacagagttcatcgaacaacacactttgcaataaaagcctcctaaagcggttgtgccgcagtggcaggcattctgtagcattggtcggcgcgccgtgggtgcgtctttgctttatcagatggagagcgctatggcttggaatgagccgggtggcaactcgaataatcaggatccttggggtggtaaacgccgcaataatggcgaccgcaaggggccaccagatctcgacgaggccttccgaaagctgcaggaaagcctgaatgggttgttcggtggtgggaaaaaacgtggtggtgacgacggcggtcgcacaagcaagggcggtggctatggcctgctgggcctgggtcttgtcgtgctggcggccgtttggctgtacagcgccgtttacgtagtggacgagcaggagcaggccgtggtgctgcgcttcggcaagtactacgaaactgttggcccgggcctgaacatctacttcccgccgatcgacaagaagtacatggagaacgtcacgcgtgagcgtgcctacaccaagcagggccagatgctgaccgaagacgagaacatcgtcgaagtgccgctgaccgtgcagtacaagatcagcaacctgcaggacttcgtgctgaacgtcgatcagccggaaatcagcctgcaacacgccaccgaaagtgccctgcgccacgtcgtcggttcgaccgcgatggaccaggtgctgaccgaaggtcgtgaattgatggccagcgagatcaaggaacgcctgcaacggttcctcgatacctatcgcaccggtattaccgtcacccaggtcaacgtacagagcgcagccgcaccgcgcgaagtacaggaagccttcgatgacgtgattcgtgcccgtgaagacgagcagcgttcgcgcaaccaggctgaaacctacgccaacggcgtcgtgccggaagcccgtggtcaggcccagcgcatcctcgaggatgccaacggttaccgcgacgaagtggtctcccgcgccaagggtgaggcggatcgctttaccaagctggttgccgaataccgcaaggcgccggaagtcacgcgtgagcgtctgtacctggacaccatgcaggaagtcttcagcaacaccagcaaggttctcgtgaccggcagcaagggtgggcagaacaacctgctgtacctgccgctggacaagatgatcgaaggtggtcgtagcagcaccagcgcaccgtccaccggttccaatgccgctgccaacgaagcgagcgcccgtgcggccgctgacttgctgcaacagcaaacacgtaccagggagagtcgttgatgagcaataaatcgctgaccgccctgattgtgggcgtcgtcgtggtcatcgctgcctggaactgcttctacatcgtggctcagaccgagcgtgcggtgctgctgcaattcggtcgcgtggtccaggcggatgtccagccgggcctgcatgtgaaagtcccctacgtcaaccaggtgcgcaagttcgacgcccgcctgatgaccctggatgcaccgacacagcgcttcctgaccctggaaaagaaagccgtgatggttgacgcctacgccaagtggcgcgtcaaggatgccgagcgcttctacaccgcgacctccggcctcaagcagattgccgatgagcgtttgtcgcgccgtctggaatcgggcctgcgtgaccagtttggtaagcgcaccctgcacgaggtggtttccggtgagcgtgacgcgctgatggctgacatcacgcgttcgctgaatacgatggctgaaaaagagctgggtatcgaagtggtcgatgttcgggtcaaggccatcgacctgccgaaggaagtgaaccgcagcgtgttcgagcgcatgagcaccgagcgtgagcgtgaagcccgtgagcaccgcgccaagggtaacgaactggctgaaggtatccgtgcggatgctgaccgtcagcgtcgtgtactgttggccgaagcctatcgcgagtctgaagaggcccgtggtgatggcgacgctcaagctgcggcgatctacgccaaggcttatggccaggaccaggagttctacgcgttctaccgtagcctgcgtgcctaccgtgaaagctttgcgaacaaaaccgacgtcatggtgctggacccaagtagcgatttcttccgctacctggaaaaagccaagtaatcagctcgtcactgtgtaggaagcactccgtcgggcggctaaaacgcctggcggggtgatcctttcagaaaacgggtgtatgatgcggcagccgggaaattcccggcttttttgcgtctgcatgtttgattcggcaggcgtgacaggtttttcgaggaaagtgcccgacgaggccgattgcaggccgttcgtcacgtcgctcttgcgcgtggtttatgcaggcggcgcgcattttctgcttcactcaaggctcggccgagggctggccgcccggatcaaaggggaatggcgtaatggcaacggtagaccgctggctgctgccagatggcatcgaagaagtactgccaccggaagctgcgcgcatcgaaatagcgcgtcgccaggtgttggatctgttccagagctggggttacgagtttgtcgtgaccccccatatcgagtacctggaatccctgctgaccggcgcgggccaggacctggatctgcgcaccttcaaggtcatcgacccgcagtcgggccgtcagatgggtttccgcgccgatatcacgccgcaagtggcgcgcatcgatgcgcacaccctgcgccgtgaaggcccgagccgcctgtgctacgccggcagcgtgctgcacgcacagccgcgtgccttgtcgtcttcccgtagcccgatccagttgggcgccgagctgtatggcgatgccagcccgagcagcgacgttgaagtgatcagcttgatgctggccatgctgcaactggccgacgtgccggatgtccacatggacctgggtcatgtcggtatttaccgtggcctggcccgtgcggctggtttgtccggtgaagtggaacaacagctgttcgatgccctgcaacgcaaggccatcgatgaagtgatcgccctcacggctggcgtgcctgccgatctggctgacatgctgcgtgcactggtcaacctgtgcggcggccgtgaagtgctggtggcagcccgtgagcgcctggccaatgcgccggcgccggtactggcggcactggatgacgtgctggcaattgccgagcagttgtcggcgcgcttcccggagctgccgctgtactttgatctgggtgagttgcgcggttaccactaccacaccggcgtggtgttcgcggtgtttgtaccgggtgttggccaggccatcgcccaaggcggtcgttatgacgatatcggcgccgacttcggtcgtgcgcgtccggccaccggtttttccaccgatttgaaaaccctggtgaccctggggcgtgctgaggtcgagctgccgtctggtggcatctggatgcccgacagtacggacgcagcactctggcagcaggtttgccagttgcgcagtgagggtcagcgtgttgtccaggccctgcctggccagccattggccgccgcccgtgaagcggactgcgaccggcaattgattctgcagaacgggctttggcaagtatcgccactggcttcttgagttttcctgccggccatcgccggcaccaagtttgcgcgaatgaggacaagtgttatgggtaagaatgtcgtagtcctgggcacccaatggggtgatgagggcaaaggcaagatcgttgatctgctgaccgaacatgctgccgccgtagtgcgctaccaaggtggccacaacgctggccacaccctggtcatcgatggcgaaaaaaccgttttgcacctgatcccgtcgggcgtactgcgcgaaggcgtgcagtgcctgatcggcaacggcgtagtggttgcaccggacgccctgctgcgtgagatcaccaagctggaagaaaaaggcgtacccgtgcgcgagcgcctgcgtatcagcccgtcttgcccgctgatcctgtccttccacgttgcgctggaccaggcccgtgaaaaggcccgtggcgagctgaagatcggtactaccggtcgcggcatcggcccggcgtacgaagacaaggttgcacgtcgtggcctgcgtgtgggcgacctgctcaacatgccgcgctttgaagacaagctgcgtgaactggtggattaccacaacttcatgctggtcggttactacaaagagccagccatcgagttcgagaaaaccctggccgagtgcaaggaatacgcagagctgctcaagccactcatgctcgacgtaaccgccgagctgcacgacctgcgtcgcgctggcaaagacatcatgttcgaaggcgcacaaggctccctgctggacatcgaccacggtacctacccgtacgtgaccagctccaacaccaccgcaggtggcgttgcgaccggttccggcgttggcccgatgttcctggactacatcctgggcatcaccaaggcttacaccactcgcgtaggttcgggcccgttcccgactgagctgttcgacgacgtcggcgctcacctggccaagcaaggtcacgaattcggcgcgaccaccggccgtgctcgtcgttgtggctggttcgacgccgttatcctgcgtcgcgctatcgatgtgaacagcatctcgggcatctgcctgaccaagctggacgtcctcgacggtctggaaaccatcaacatctgcatcggctataaagatgccgaaggcaaggacgttgctccgaccgacgccgacagctacgtgggcctgcagcctgtgtacgaagaagtgccgggctggaccgaatcgaccgtgggcgccaagaccctggaagagctgccggttaacgcccgtgcctacatcaaacgtgtcgaagagctgatcggtgcgccgattgacattatttcgacaggtccggaccgcaacgaaaccattgttctgcgtcatccgttcgcttaataagctgttgatgtaaaaagcaaagggctccttcgggagccctttgtcgtttctgtcgcctgggcggcacgacccttgctttggttctttctttcgcggtgctatcaaattaatggcacccgtggtggagggattcccgatgtctgccgttctctcattgttacaaagccgtctgttgcggccagtgttcgttaccctaggtatcgctcttttggtgcaagtgctggtggcggtcgccctgacgcgaagcacggtcactgcactggaggcagatctgggcaatcgcctgggtgtcgacagccagaagctgtccggcgaattggcccaggctggcaaggaagtcacgtccagtctcgatagcttgtctacgagcacccgtcagcgtctaaccgcagggctctcgacccgcctgcaggaagagcagaagcaactgcgtgcgaccctggaaaaagacctgaaagactctgccaatgacatggcgcaactgctggcctcggtggcgccccgcgccatgtgggacagcgacgtgccgacgctgtcggagttcgcccggcgcgcccagcgcaatcccaacgtgctgttcgtggtctatgacgacgcggcgggcgagcacctgacgcgctacctgaaccgtgaaaacccgatcaaccaggcgttgttggacaagggcaagggtgatcgtgccctggataaagtgttggatgcggccaaagatgatccttcggtgttctacgtggaggcgtccatcagccccaatggcgtagagatcggcaaggtgcgcatgggggtttcgacggctgcggttgaggctgacctgcaagcgctcgataaacgttttgcggcgctgatcgccagcggggatcaactggtcggcgatagcctcaagggcgcggcggccgacagcgctgccgccatgggcgcccgcttgcaatctgcgcaagccacggccacccagatgacggccaataccacgagcgccgttcaggacgctgctggcaccctgcgctggcgtatcggcatggggctcgcgctggtcggtcttggcgtattgctgttgatcgctgtggtgctgggtcgccgtgtggtcaaccgcttgaagctgctgatcgcggccatggacgatttggcggcgggcgagggtgatctcaccaagcgcgtgcagatcagcagcaaagatgaaatcggcgacatggcttcggcggtcaatcgctttgtggataagttgcagcccatcgtgcgtgaggcgggggatgtggcccagcgtaccggtgtggaaattggtgccatgaccctgcgcaacgcaggtgccgatgcggccgccggcttgcagcgcgatgaagtggccgagagcttgcgcgcactgtcgcaaatggccgatgaggcgcaggccgaaagtcatgcgatgcaggcggcgttgcagcaggtggtggatatccgtcaggccacggacgagaactcgcgcacctcggctgaagtcggcagtttgatcgaggcgctggcggggcaagtccaggccggttccacggtcatcgagcgcctggcccagcaaagcgagcagatcgaggtggtgttgactgtcattcacggcattgccgagcaaaccaacctgttggcactcaacgcggcgatcgaagcggcgcgtgccggcgagaccgggcgcggcttcgcggtggtggcagacgaagtacgggcactggcgagcaagacccaaagctccaccggcgatatccaggcgcatatcgtggcgttgcagcaaggcgcgcgggaggcggtggaaaccatcggcaaggctgggcgtcaggcgaatgagggcttgctggtgctgcgtgacagcgtgcgcttgcagcagacggtgcaggcctcggtggagcaggtgcatgccgcgattggtttggcgacgcgtgcagccgagcaccaggcccagggcgcccatgcggtgcgcggccgggtcgaggtgatccacgcccaggccgagcgtgctgctcaggcggtggtggagactaccgccagtggcaaggtgctggatgggttggcggcgcagttgaaggcgagcctggggcagttcagggcctaggtggatagccagatggacgggcaggctaattagtcttgaatttggctacatactcattcaaatgttctccagggaagcatattggcgctggggggcatcgtctcagtattatggggttagcgatgctgcgatggtgccaatgcgccttttttcaatagttttgccgcaactcgaaaaaggtcgggcatatctaagcgaccgtcattccgccgatacattacacctatctcttcaagcatcttcgagagttcttcctccttatgtgcctcttggtttttaaagggcagaaggtagctgtgacgttttgcgtctgcaactaatgtctttatagttcctgcctttctccatacgtcaaatactgcatgatcatcttgcggcaagagtaggcctgctagaggcgctaggacccccttgatccatgggaattcttgatgcagttggtcgacacgtgtcttagaggcttcacggaggccatgtctgatgccatcaggagttaaaaccttgtctaggggcgcaacaccatatttcgctgccgcattcatcagtcccaggaagcttcttggtgtaacttccgcatgggcgtcagcagtatgtctcaacggccattcgtaggtgctgccttttttgaatgcatagctaccagttcccatatatgggccggagaattcaatcatcaagttcttctgatcttcctcgtcatggatcagagaccaccgccgagtcaagatggatttcctgctgggtttaggtagattattagctgtcagtagcttgttaaacgctttacgagtgtcttccttacttgatgaggctagtcgcgaatacagaaggccatagaggtctgtccaagaccacgccaagcggactgccccagttcggagtttcggaagttctacgaatcgtagtgcatcatcctcaatctggtcaggacgtaaaaaaagtttgacgcgaatagagcggtaggcgcgcatagcccataccacttccaaaagggcctctgtcagcagccgtcgccgcggccatgtgcgtgctacggtatcgagcgcgtcatagacaatcagtaaagtttttccttcgtcacgaagccggtgctcatgatcaatgagcagatcttctcgaagctcccaatccattccagcactgataaatttccccggtctgctactaagctttcctgctgactgagccgctgcacttaaaatagttgcccaccaaaaagctttagcttcatcgagcgcagcggtagcaggtacatatttatcaatcgcttcatgagatatgccatcagggcctccgacgccagtgtatccaaaccgaacaatcagttcagagaggcctagcttgggataagcaatagctgcttccttcagtgtttcagtctgaccaagaacacttgaccaaaaacttttgccgctgccgcgcgatcccacaacaattggaatcattggatccagcgcaacagcgtgtttttctggtgcatagaggtcctcaatttttgccacatgggcgccaaccgcatcattagatacgtcgcctgggaattgagcgacggcgttacgaagtgctcgaaagtcgtcttgggaaagattcatttttattccaggagctgagggatgctattgtttatcttgtctagtagttcctgataggaggagctgtagatgctgttttcgattaggtcgcgttttattaaaggattgaagcttttgtatcgtgagtcgtcgatgattgctaaaggggtgaaataattagggtcttcagctggtagcacatctgcgtcggaaatctcatcgtcccactccaactgatcaaagtcgctgatctcatggttgatctcgttaattgggcttttctggtgaggccctagtccgatagtagtaaacaagctttcgcaacgttctgcaaagtctttgcgaagctccgattctgcgggagctttgccttggataattgtgaatcggcttagccagccaggcaattgctcggcgttagtgaacttagccatatgggatagtagaattctaaagccttgaaaggtttgtggctcatctagtccgaaaaggaatacttccgcccctaaacctaataacgcagaagcagtggtttcgtgaaggccggcacgagcatcgaccaggataacgtcataccgacgcggatcagaaaactggtcgattagtgatgaaatttggtcaagaaccgtaattacttgtccttcgggggtaatgtcctcggcgtaagcccgagcaatttttgctaggacttcagacggattatttattgagcgccgacccaagacaggtataacgtctattcggccgttattaccagtcaatggtgacgggctgactaagtcggccaagaaagtttcgtccagtgctgtaagtccattttcaactaaggcatctagcaagccaaactcagggagcgtgtcatcgttcagaagaatagcgccgagccctggagcctcaatgtccaaatctatagctaaaacttttaagccgcgagcagccaaatccgccgctacaactgcaagcgctgtcgatcgcccaactccgcctttaatgcttgaaaagacgaagcgcggtggcgctgagttaggtggggctggggcgcgtagccaatccgctccaaccagacgtctatctattaggcgaattttccgcccttctatgataagggaagttatcgtgttttcgattaataaatcactgactccatattccgaaatgtcagctaccagttgatcgtctcgggcgtagtgcttaagggacgaccgcagtgatgtcgatagttgctcgatagtcgctggagacaaaatcgagttactaaaaaatgccaatctgccggtggtgtcgcgtaatacgacaccgtcagaaagtgcctcatctccaagctgtctagccactgttgtggcaagtattctaaggctgtcatcgaagtgaacgcgcatcaataaatcctcaggtaccaatagagccaattacgctaacggcctgcgctttccactgatccaacagtctggttgggatttggtttcctttgctgtagcgcatcgttatatcccaatctgaaaaaaagttgtcgttcagaacgtgtctgcgtaaaacagtggcatttctgccttcaagcttgtttctgagtagcgttttcagcgttggaaagtgtgcgaaaaaggggtcattttcacggctcgcgagtggcctgaacccgatttcaagcatcaatgcctttactccgcattcggcagcaattccgtacaagtaaccagcaacatctctgcggttagtagggtctagaatgtcagctgcttccagatgtcgtctcgctgctgctctcatgtctggggcgtaaggcatctatctctaaccttcaaaaaatgaaggaacaatagtcgttcggatggctgaaatccattgtaatttgttactagggaatatgcgcgtttgagggcttagcgactcaggtacatccgggttgtcagcagataaaccggcaaccccgacaccaaaatcaacagcgccgcataaggcgccgccgccgcgaactccacgttcgaggtatgcgcccaaacggctgtggccagggtattcaacccggtcgggctcagcagcaaggtagccgtcaattccttcatcgcatccaggaataccagcgcaaacgcagcacccaatgccgggaagataatcggcaaggtcacccggcaaaacgcgctgaacgacgacgcgcctagagtccgtgccgcctcttccaattgcggcgccgccttgttcagcgccgtacgaatcggtgcctgggccagcggcaaaaacaaaagcgcataagcaatcagcaacaacgccgaggtctggtacagcgctggcacgtaatgcagggcgaaatacaccagactcagtgcgatcaccaggccgggcaaggcgtgcagcaagtaaggcaggcgctcggcccagatcgccagttggcctttgtagcgcaccaccagcagtccgaccggcaccgccagcaccaggcaaagcgcggcgccgccgagcgacagcgccagggaggacagcaacgcctcactgatctcggccagcggaaatgcagccgacgaacctactgccagccaataaccgagcatccccaggggaatgccgctgccgatgatcgccagcgccaggcaatacacctggctcagtggcgcccacttacccaatcgaacctgctccgcatgtcgcgctgcgccctggccaatgcgcacgtgccggcccttgccgcgcacgcgcagctccagccatagcagcgtcaggcacatcaccagcagcaccgccgagagcatcgcggcattcgcattgctgaattccagctcgaactgttggtagatcgcggtggtgaaggtctgcaacccaatgattgacagcgcaccgaactccaccagcatgtgcagcgcgatcagcaatgctccagccagcagcgagggccacaacaacggcaaagtcacgcgaaagaagatgccccagcggttcagtcccagggtacgggccgactcttccagtgcgggatcaagattgcgcagcgttgccgccaccggcaagaacaccagcgggtacttcgacaggctcatcaccaggatcgccccgccgagcccttcgaaactggcgctcaacgacacccaggtaaagctgctgacaaacgccggcaccgcaaacggcaggcacaggatcacaccccagatgcgccgccccggcaggttgctgcgctccagcaaccaagccagggacaggccgatcacgccgcacgctaccgttaccccgaccatcagcgccagggtgttgcgcagtaacccaaacacatacggtcgccacagcagatgcaccgcctccgcccagcccgcttgccaggccttggtgccgacgtacgccagcggcagtaggctcaagccaaccagaaatagcaccggtagcaacagccagatcgacgggcgcttgcgccgcgggctgaaccctgtgcgcagggcgggtagcgatgggttcatcagttcaagccaacgtcacgttccaggtccagggcttcttcggcgttgcccaggtcggccggggtgactttcggcggttgcagttcgctgaaaggcttgagaccgcgattggattccatacccttgcgcagcgggtattcggccgaggtattggtgatcacgcgctggccttcttcactggccatgaatgccaacaattgctgggcttccttggggtgcttgctggatttcagcgcggcggcggaagacacggtgatcaggccaccggcgtcgccattggtgaagtagtgcagttgggaatccagattggtcttttctttcttcagggcgaaccagtagtagttgttcaccagaacggtggccacttcgccgttttcgacggctttcagcgcaaccatgttgttgctgtacaccttgccgaaggcgcgcaggccggtcagccattcttcggcggcttcacgaccgtgcagcttgatgatcgccacagcctgttcctggaacgcgccgctggtcggcacgaagccgaccttgccttgccactcggggccggcaaagtcgagtaccgatttgggtaggtctttttcggcgatcagtttcgggttgaacgccacgacacgggtgcgtgcggttacgcccatccagtcgccatgggcgccaacataatccttgggcaatacgtcgagggtgctggcgtcgatcttggccagcaggccttgctcgccgagtttgttcagcggcggcgattcttcggtgtagatcacgtcggcaggggagcggtcgccttcttcgacgacctggctggccagctggttgctgctgcctttgcgcacgttgacgtggatgccggtcttggcttcgaaggccttggcgagctcgtcgccgacttctttgtgctggccgttgtacagggtcagggagaccttgtcggcggagtaggcggtgggggagagcaaggtcaggccgagcagagtgagggtcaggccacgcagaagggatgtcttgagacgggtatcgcggatggtcatccgaagttttcctcgcttgtgtgcaacaaatcattgcaaggataaacgataaagtttctcaggtgcggatgcaggtggaaatcgacagggaagttttcaaaccccggaaacgaaaaaacccgctttcgcgggtttaatctgaatttggtgcccaggagaagactcgaacttccacgaccttgcgatcaccagcacctgaagctggcgtgtctaccaatttcaccacctgggcattatcaacaacgcttgcgctgttgatggagcgaactatacggagggctttttgatctgtaaacccctgattcaaaaaaataaatcaagttttccgttaaaaatcaaagccttgaaacgaaaaaacccgctttcgcgggtttgatctgaatttggtgcccaggagaagactcgaacttccacgaccgtaaggtcaccagcacctgaagctggcgtgtctaccaatttcaccacctgggcattatcaaacaacgttgccgtcgtcgatggcgcgcactatacggaggggattttaagctgtaaacccccgccacgaaaaaagcctggaaaatttcgccagtggtcgtgcaaggtgcccgttgcgggctgcaaagggctttaaaaggcttgttgacgtctgaaatttcccgtttcaatacgcgtatgccaaactaacccgcatatagacaaggtgaaaactctctaatggccgattggcagtccctcgatcccgaggccgctcgtgaagcggaaaaatatgaaaaccctattcctagccgcgaactgatcctggcgcatctcgccgatcggggttcgcctgctagccgcgagcagttggtcgaagaattcggtctgaccaccgaagaccaactcgaagccctgcgccgccgcctgcgcgccatggagcgcgacgcacaactgatctacacccgccgtggcacttacgcgcctgtggacaagctcgacctgatcctcggtcgcatcgccggtcaccgtgacggcttcggctttctgatcccggacgacggcagcgacgatctgttcatgagcccggcgcaaatgcgcctggtgttcgatggcgaccgtgccctggcgcgcgtttccggtctcgaccgtcgcggtcgccgcgaaggcgtgatcgtcgaagtggtgtcccgtggtcacgagaccatcgttggtcgctacttcgaagaaggcggcatcggttttgtcgtgccggacaaccccaaggtgcagcaggaagtgctgatcaccccgggccgcaacgccaacgccaagatcggccagttcgtcgaggtgaagatcacccactggccgacgccgcgcttccagccgcagggcgatgtgattgaagtggtcggcaactacatggcgccgggcatggaaatcgatgtcgcgctgcgcacctacgatattcctcacgtctggcctgaagccgtcgtgaaagaagcgcgcaagctcaagccggaagtcgaagagaaggacaaagagaagcgcatcgacctgcgcgatctgccgttcgtcaccatcgacggcgaagacgcccgcgacttcgacgatgcggtctactgcgaggccaagccaggcaagctgcgcctgttctccggcggctggaagctgtacgtggcgattgccgacgtctccagctatgtgaagatcggttcggccctggatgccgaggcgcaggtgcgtggcaactcggtgtacttccccgaacgcgtgattccgatgctgcccgaggagttgtccaacggcctgtgctcgctgaacccgaaagtcgaccgtttggccatggtgtgcgagatgactatctcgaaaaccggcgaaatgacggactaccagttctatgaagcggtgatccactcccaggcgcgcctgacctacaacaaggtcagcaccatcctggagcagccgaaaaccagcgaagccaaagccttgcgcggcgagtacggccatgtcgtgccgcacctcaagcagctctatgcgctgtacaaggtattgctgggcgcacgtcatacccgtggcgcgatcgattttgaaacccaggaaacccggattgtcttcggttccgagcgcaagatcgccgcgatcaccccgaccacccgtaacgatgcgcacaagctgatcgaggaatgcatgctggcggccaacgtggccaccgctgaattcctgaagaagcacgagatccctgcgttgtaccgcgtgcacgacggcccgccgccggagcgcctggaaaaactgcgcgcgttcctcggtgaactcggcctgtccctgcacaaaggcaaggacggcccgacgccgaaggattatcaggctctgctggccagcatcaaggatcgtccggattaccacgtgatccagaccgtgatgctgcgctccctgagccaggcggtgtacagcgccgacaaccagggccacttcggcctgaattacgaggcgtacacccacttcacctcgccgatccgtcgttacccggacctgctcacgcaccgcgccatccgcagcgtgatccactccaaacagaacactccgcacgtcaagcgcgccggtgccatgactattccgaaggcacggatctatccgtacgacgaagcggccctggaacagctgggcgagcagtgctccatgagcgagcgccgcgccgacgaagctacccgcgacgtagtgaactggctcaagtgcgagttcatgaaggatcgcgtaggcgaatcgttcccgggtgtgatcacggccgtgaccggctttggtctgtttgtggagctgaccgatatctacgtcgagggcctggtgcacgtcaccgccttgccgggcgactactaccactttgaccctgtgcaccaccgcctggcgggcgagcgtagcggtcgcagcttccgtctgggcgataccgtggaagtgcaggtcatgcgcgtcgatctcgacgagcgcaagatcgacttcggcatgcccgacaagcccgcagaagcgccgggcagccgtaaaaaacgtggcagtgaaaccacggctcccgccagcaaaggcaagggtgctccagctaaggtggctgcagagccagcgcctgccaaggccggtcgccgctcatcgaccaaggaaaaggcccccgaagcctaccgcccaagcgacgcagcggcgaaaaacgccgaactgcgcaagagtcgtgagttgaagcagcagttgctcaacgaagccaaaagcggtggtaaagcggcgtctgggggaaagtcccacggggcggaaaagccgtcgagcaagcccagtaaacaccgtaaaggcccgccaaaagcgggttcggctcccgcgaaaagcggcggctcgcgcaaacctaaggccaagtcatgagtctggaaaaaatctacggcgtccacgccgtggaagcactgctgcgtcaccaccccaagcgcgtcaagcaagtctggctggcggaaggccgcagcgagccgcgcgtacaagcgctggttgaactggccacgcaaaacaaggttgccatcggccaggccgagcgtcgtgaaatggacgtgtgggtagagggcgttcaccagggcgtggtggcggatgtcagcccaagccaggtgtggggcgaggcgatgctcgacgagctgctcgaccgcaccgaaggtgcaccgttgctattggtgctcgacggcgtgaccgacccgcacaacctcggcgcctgcctgcgttcggcggacgctgccggtgcgctggcggtgattgtgcccaaagacaagtcggcgaccctgacgccggtggtgcgtaaggtcgcgtgtggcgcggccgaagtgattccgctggtggccgtgaccaacctggcacgcaccctggagaaactccagcagcgtggcctgtgggtcgtgggtacggcgggggaggccgaggtcagcatttatgaccaggaccttaccggcccgaccatcctgatcatgggcgccgaaggtaaaggcatgcgtcgcctgacccgtgagcactgcgattacctggtgcacctgccgatggccggtagcgtcagcagcctcaacgtgtcggtggctaccggcgtttgcctgttcgaagcccagcgccagcgtggcgcgaaggccaaggccaaaccgaagaagtaatcaaaatgtgggagggggcttgcccccgatagcggtgtgtcagttgcagatgatgtggctgatcctccgtaatcgggggcaagccccctcccacagtcgttttggggtgcttggaagattgttcaaataatcaccaatcaccttgcgcgcatcctcccccttctctacaattgcgccccttgccttcctggcgggcaccgatgtgcctccctgcggcaagatccataagtgtcattcactccttgtctgaccgtttttgagcggcaggctacaacccgtaaggagcattcatgcgtcattacgaaatcatctttttggtccacccggatcaaagcgagcaagtcggcggcatggttgagcgttacaccaagctgatcgaagaagacggcggcaaaatccaccgtctggaagattggggccgtcgtcaactggcctacgcaatcaacaatgttcacaaggctcactacgtgatgctgaacgttgagtgcactggcaaggccctggccgagctggaagacaacttccgctacaacgatgcagtgatccgtaacctggtcatccgtcgcgaagaagccgttaccggccaatccgagatgctcaaggctgaagaaaaccgcagtgagcgccgtgagcgtcgcgaccgtcctgagcacgaaggcgctgatagcgttgatagtgatgacagcgacaacagcgataacgctgacgagtaatccacggaccttttaaggagcctatcaaatggcacgtttcttccgtcgtcgtaaattctgccgcttcaccgctgaagacgtgaaagagatcgattacaaagatctcaacactctgaaagcctacgtatccgagaccggcaaaatcgttccaagccgtatcaccggtaccaaagcacgttatcagcgtcagctggccaccgctatcaagcgcgcccgcttcctggccctgctggcctacaccgacagccacggccgctgagaccgggcagtcgacaagtagtaagggattgaatgcatgcgcgccttagctgagttcatcatgcgcggtcgcgtgcaggccactctggtagtggctggatgtgcagcattgccgttgttgtattggttgggtgctgccgcaggttgccttgtgctgctgcggcgcggtttgcaggatgcccttggcgtcctggccctgggagtgctggccgccttgatctggtggctgcaactgggcgaacccaaggtacttctggtgttgctggggtcgtcgagccttgcgttggttttgcgcgcaagtgagtcctgggcccgcacgctgctggtcagcgtggcagtggggttggtgttttcggtgttgatcgacgcggctttccgcccgcagatcgaggcgctgtcgcaagagatcgtcaagatcctgccgatggccctcggggaactctaccagcagctttcggtagatgagcgagcgcgtcttgcgacactgattgcaccggccctgatcggcctgatggcggtaatgatgcagatcgtcagcgtgctgagcctgatgcttgggcgttattggcaggcgttgttgtacaacccgggtggttttggtcgcgagtttcgcagtatcagaatccccgtgggcccggcgatgttgctgctggcactcatggtggtcggaccgtacttcggttcacaagccaccttgctggtgctgttttgcagcgtaccgctggtgttcgccggactggccctgattcacgggctggtcgcgcagaagcgcctggccaagttctggctggtggggatgtacgtaacaatggtgctgttcatgcagctgatctatccgttactcgtggttctggccattgtcgacggcctgattgattttcgcggtcgtctggcgccgaaagacgccgataacgcgaacggtgaaggttaaaagttagaggattttcacatgcaactgatccttctggaaaaagtcgccaacctgggcaacctgggcgacaaagtgaacgttaaggccggctacggtcgtaactacctgctgccatacggcaaagccaccgctgcaaccgctgccaacctggctgcgtttgaagagcgtcgtgccgagctggaaaaagccgcagcagacaaaaaagcttcggccgaaactcgcgctgcccaactggctgagctggaagtgactatcactgccaccgccggtgacgaaggcaagctgttcggttcgatcggcacccacgacatcgctgatgcactgaccgcctccggcgttgaagtgcagaagagcgaagttcgtctgccgaacggcaccatccgcaacgtaggcgaattcgacgtagccgtgcacctgcacgccgaagttgaagccaccgtacgcgttgtcgtggtagcagcttaagccgcacctaactgactggcacctcgcgtgccaggcggttaacatcgggcacgatcctgtttacaggtcgtgccttttgtttttctacacacccccaaattccaagtggccatgaacgatatttcagctcctgagcaatacgatctgcaaaccgctgccctgaaagtgccgccgcattccatcgaggccgaacaggccgtgctcggtggtttgatgctggacaacaacgcctgggagcgcgtgctggatcaagtctcggacggtgatttctatcgccatgaccaccgcctgatcttccgtgccattgccaagctggccgaccagaactcgccgatcgacgtggtgaccctggccgagcaattggacaaggaaggccagacctcacaagtcggcggcctgggctacctgggcgaactggcaaaaaacacgccgtccgtcgccaacatcaaggcctatgcccagatcgttcgccagcgcgccacgttgcgccaactgatcggcatcagcaccgagatcgccgacagcgccttcaaccccgaagggcgcaccgccgaagagatcctcgacgaagccgagcgccagatcttccagatcgccgaggcccgcccgaaaaccggtggcccggtgggcgtcaacgagctgttgaccaaggccatcgaccgcatcgacaccctgttcaacaccgacgccgccatcactggtatttccaccggttatgccgacctcgacgagaagaccagcggcctgcagccgtccgacttgatcatcgtcgccggtcgtccgtcgatgggtaagaccaccttcgcgatgaacctggtggaaaacgccgtgttgcgcagcgacaagaccgtgctggtgtactccctggagatgcccggcgaatcgctgatcatgcggatgctctcgtcgctcgggcgtatcgaccagaccaaggtgcgttccggccaactggaagacgacgattggccgcgcctgacctcggcggtcaacctgctcaacgaccgcaagctgttcatcgatgacactgcgggcatcagcccatccgagatgcgcgcccgtacccgccgcctggtgcgtgaacacggcgacatcgccctgatcatgatcgactacctgcagttgatgcagatccccggttccagcggcgacagccggaccaacgagatttccgaaatctcccggtccttgaaagctctggccaaggaattcaactgcccggtggtggcgctgtcccagctcaaccgttccctggaacaacgccccaacaagcgcccggtgaactccgacttgcgcgaatccggcgcgatcgagcaggacgccgacgtgatcatgttcgtgtatcgcgacgaggtgtaccaccccgagaccgagcacaagggcattgccgagatcatcatcggcaagcagcggaacggcccgatcggctttatccgcctggcgttcatcggtaagtacacacgcttcgagaacctcgcgccgggcagttataacttcgacgacgacgagtaaaacccaggctcaagggcgcgtctcggggagcgggccgaacaacgcgcggatggtcggttcgttgtactggtagttccagcgcagctcggtgccggcgcaaatatcctcacgggtaaagaatgctgttagcctcagtgattcccgaggttgctcgcctttctgggtctccacattgaaatacactgcttcgacgttgtagccaccgcttgcctggcgcaccgggtaaccggcttcgtagtcaaagatagtgttcatgcgcgacagcacgttatcgcctgagagcacgacttcgcggttgatggggctcgcggtcgtctcgtgtggaatctgataggggcgcacgtcgatcaggtacgggtcccggcgaaacccggcgatgtgatggggcagtaaaccgccgccgtatactcccagcacttctcccttcgtcaagtctttcgtgctcaccacgcacgactgtcctatcaataccgactcttcggcgaagcggcactgggcttgagtaaagggcaccacttcgattttttcgtcatacaactgcgcaaccttttcataaccttcccactggatgtacggcagtaccggctgcttgtcgaacagcgcaccgctcgttggggatttgccctggctttgcatggctttgatgcgcatcggttggccgtccacatcgcgtaggggatagcggccattgttggcgcggtcgtagaggcctcggtaattctgactgaactggtacgaggcgtgggagcgcatactgcgcagctcgctgggcccgtatggatgaggtgggttggggaggggcgacggtagactttccagcgctgactcatagtcgacgttcgagtcggccgattcgaacagctcgctggacgtggagccggagcgcctcctggggggtgtcggcatcccgcccagtagtgcatccttctgcggatcaatctgccagccgccctctgcgttcttgccgatatacggttggtaggccctgaagcggctgcgggcgtcaagcaaacgccaccccagcgcgtcggctttgaccagatagtagttgccggactccagcacgtaatagcggtagctgccatccggcaggggcggggcttggtagacgccgtctgcgcgcaaggtcagcccttcggggggcgtcgggctggcgaaaagcgggtcgaaaggcagccccggtacagcaggggagtctgcccacggtgttggcgcacgtttgggcggcgcgggtttggccagcagttcgaggctggccttgcgcaaggcgctgggcaggtccgcaactcccgactggcgcagcacgtgactgcgctcgcggtctgaaaggctttgatcgatagccgtgagcaggtcggctggtgcgcccagcgcttggccttgagcggtatggcaagtgaactgctctcgttcatgcaccagcaagtgcccggtgtcgttttcgccggctccgttgctatagagcaaggggccggtgagcgtttgctcgcggatctccagtcgactggatgttggccagccgggcaaagactccagtgctgtcagcaccagcacagggtagtcggggctgcgggttgtcttcaggtagaggctttcgtaggcacgatggacgctggattggttcaggtattggccgaattcccaatgctgttgcgcggtgagggagcgttccagctgtaatcgctgctgatctgcgaagctcagcccgcaggtcgcctcttccagatgatatttcgataggccgggcaggatgtcacggatcgtctgctccagcgcagacgcgggttgttcggcgcggtcgttgagccaggtaaacacgcggtctgcgtgctcatgggcctcggccgccagggtgaatgcgaggttttcgacgttgctggagcgtccgacccgtctggcgggcagttcattgaactgcgcttgggtcagttgttcttccaggcagtccagcaactcgcctttgcgaaagcgtgcttcagggactgtgatttccagcccctggttgccgtggctgaacaggacccgttgctgttcatcgaccaccttcagcacgcggttcgtcggccattttggcaaggataccagcaggtgaaactggataagtggagagtgtcgactcacttcgctgccttcggcacgggcgaagttgaagtcttcgatttcctgcgccaggttgaagcgcctgactgtgtcgcgcaggcccggcggcgggcgtacgacttcctgatgcgcctggcgcagcaggctggcgtcggcaccactgacccgcaggatcggctccaccgctgatgccttgatgtttgacgcatcagggcccagccgcttgatcagtttgaagtcgtcccaatcgcgggcggtttcgtgttcctggcgccacccgccgacgtcattgctgagcatctgcggctgataggcgcgcgggtcgctggggtgttgcaggcgccattgcgaggtgcgcgggtcgcgggccagggcgtgcaggtggtcatcgagagacacgtaatgctgcccctcgtagtgctgcagcccctgggcgtcgaccggcacctgcgctggcagtgtcttgagttggcggtacggcaccatgtccgggttccacaggcgcatgccctgttcctgcaccttgaccgcgatcaaccgcgcgccgaaccctccggctttcaccgcgcctgcggtagcgacgccctgggcgacggtgtccaccacgtccatcatgtcattcagggcctggtcgctgtcccctcggctccaggcggcaaacccgttgtaaaggctgtcgaccagctgtgcggctgttaccaccagcagcacttcgcccacgatgggaatgaatgacgccgcgaagaacagtagcgacttaccggtctcggcaaagtaatgcaggcgtttctgccggctcagggcgtcggcatctgccgttggcaccgccagggtgcgggcgtcgtcgcggatctgttggatacgttgtatggcgaccgcctggaacgcgtcgccctggatcagggtacggctgactttggcttcaaggcgggccgcaatcaccctggcgggagagtcgatgcgtggcgcgacggtcctggcgggcagcaccgtgagcagcgtgccctggtgtcgaagcggtaccagtcgctggaaaaaaccgaagtaggcgggctgggccaggcgttgtaccagcgagtgttccagggactccattgactcatgcttgcggaacgagccgacgggatcgtcgggtatatagagcagttgctgtcgatccacttgcgtatcgtggatgaccagcacgctcggcagcaccacgccgcccagggtcaggtggttgcattgcaggtcgggatggccgccattgcgggccagggccagtagagtgctgtacagtctttgatcaatccagcccctcaaatgagcgatatgcgaggcggtttcaaaccgagtctgttcacttcgggaaaaaagctggcgtacctgcacggctgcctggggtgtgtccttgggcgcaagcagcgtctcaaggtgttggaggtaatgcttgcccaggtcgaggctgcgacagaaaccggcgaacatgatcggtgagatgggctgccgggttatcgcggcgccatacacgttgtaaatggccgatccggcttccatcccgccatcctcggcttcgcccgcttcaaagttctgcagtgcggcttccaacaggggttgttgggtggtcctggcgtgggtcttgatcaggcccagcaggtgatggtttttccattcgcgcaacacaaccccacgctcactgtcgagcaggccgaagaaggtgctctggagcgcgctttcgaaatacggccgggcgtactccgaagggcttttgagctggctgagcagcgccttgaggttgtgccgggcctggttgttgtcgaccaggctgcggcgcaagtcatcccgcagcgtcttgtttgcccgggtgagccagggaggcaggtttttctgaatgaactcagcgtgggcctgcagcacggggggcttggccgtttttggcgtcagggcgctcatggcgggtcctagggtgggttggtttgccacaggttacccacgaagatttcccggaatggctagccgggtagtgcgcggcaatgggcgaaaccctatagcgactcggcctggaatgacggtgtggcaaaagccgaccattgccgtcggaattggtcaaaatttgtgctatattccgcgcccgcgattttccatctcaacaccggtcaccgtcatgcaaacagccaagccgttatttgactatcccaagtactgggccgaatgtttcggtccagcgccattcctgccgatgagcagggaggagatggatcagcttggctgggattcctgcgacatcatcatcgtcaccggtgatgcctacgttgaccatccgtcgttcggcatggcgatcatcggccggctgctggagtcccagggcttccgcgtcgggatcattgcgcagccgaactggcaatccaaagacgacttcatgaagctcggcgagccgaacctgttcttcggcgtcgcggccggcaacatggactcgatgatcaaccgctacaccgccgacaagaaaatccgctccgacgacgcctacaccccaggcggcatggccggcaaacgcccggaccgcgccagcctggtgtacagccagcgctgcaaggaagcctacaagaacgtgccgatcgtactcggcggcatcgaagcctccctgcgtcgcatcgcccactacgactactggcaggaccgggtgcgcaactcgatcctgatcgacgccaccgccgatatcctgctgtatggcaacgccgagcgcgccatcgtcgaagtcgcccagcgcctgtcgtggggccacaagatcgaagacatcaccgatgtgcgcggcaccgcgttcatccgtcgtgacacgccggccggctggtacgaagtggactccacgcgtatcgaccgtccgggcaagatcgacaagatcatcaacccgtacgtgaacacccaggacacccaggcctgcgccatcgagcaggaaaaaggcccggttgaagacccggaagaagccaaggtcgtgcagatcctggccagcccgaaaatgacccgcgacaagaccgtgatccgcctgccatcggtggagaaagtccgtggcgacgcagtgctctatgcccatgccaaccgcgtgttgcacctggaaaccaacccaggcaacgcccgcgccctggtgcagaagcatggtgaagtggacgtgtggttcaacccgccacccattccgatgaccaccgaagaaatggactacgtgttcggcatgccgtacgcccgcgtcccgcacccggcttacggcaaggaaaaaatcccggcctacgacatgatccgcttctcggtgaacatcatgcgtggctgcttcggcggctgcaccttctgctcgatcaccgagcacgaaggccgcatcatccagaaccgttccgaagagtcgatcatccgcgagatcgaagagatccgcgacaaggtgccgggctttaccggcgtgatctccgacctcggcggcccgaccgcgaacatgtaccgcatcgcctgcaagagcccggagatcgaatccgcgtgccgcaagccatcgtgcgtgttccccggtatctgcccgaacctcaacaccgaccactcgtcgttgatccagctgtaccgcagcgcccgtgcgttgccgggtgtgaagaagatcctgatcgcctccggcctgcgctacgacctggccgtcgagtcgccggaatacgtgaaagagctggtcacccaccacgtcggtggctacctcaagatcgccccggaacacaccgaggaaggtccgctcaaccagatgatgaagccgggcattggcagctatgacaagttcaagcgcatgttcgagaagtacaccaaggaagcgggcaaggagcagtacctgattccgtacttcattgccgcccaccccggcaccaccgatgaagacatgatgaacctggccctgtggctcaagggcaatggcttccgcgccgaccaggtgcaggcgttctacccgtcgccgatggccaccgccacggccatgtatcactcgggcaagaacccgctgcgcaaggtcacctacaagagcgacgcggtgaccatcgtcaagagcgaagagcagcgccgtctgcacaaggcgttcctgcgctaccacgacccgaagggctggccgatgctgcgtgaggcactgacccgcatgggccgcgccgacctgatcgggccgggcaaggaccaactgatcccgctgcaccagccgagcaccgacagctaccagagcgcccgtcgcaagaactcgacgccggccggcagccacaaggtcgccaaggaaaccaccaccaggatcctcacccagcacaccggcctgccgccgcgtggcagtgacggcagcaacccgtgggacaagcgcgaacaagccaaggccgcggcccaggcgcgcaacaagcaggccgccaaggaacgcgccgatgcggccaagggcaagggcggcaagcctgcgcgcaagccggtcgtgccacgttgatcacagcctgaacatgccagacgccagcctcgtgctggcgttttgctttctagctgttgggtaacctgtttgctaaggtggcgcccattaaatcgctatcgcgggcaagccccctcccacattcgaccgcattccaaatgtgggagggggcttgcccgcgatggggcccgcctggtcaccatcattctcaaggaagaacactcatggctaaccccctggcctccatcggcatggactccaaccgctcgcagttcatggcgcgccaacgcatcgaaagccagatcaacctgccacgcctgttcgcggccattgactccgatccaggtatcgttggcgcaggcgtcgtatacatcgacgccgatttcaacgtcatcaccctgcgcgaattcaagcccatctgcagcatcaagcctaagcgcatcattttgcgtgaagcacagaagtacattgcgccgacgcagtttgctcaacatgtcgtgagcaatcctcgagagtcccgactgattggcgaagccgtcaataccggaatctcctgcctgggggctgtcatcagctgggctgcgatcgccagtggaaccattctggtgcctttcagtgccggcgccagttccgtcatcgttgtggtgggatatgcggctgccggtgcaagttcgctccagtgtttcaacggcattgctcgaacagcgctggaggtcgccaaaccggaggtaaacgattggctcgacagtgagggctggtaccagaatgcatccgttgtgttggacgccgtatcactggccggcgtaggcggttcggccctgacgacggtcaagctggtcagggctgccaaagcatcgacgggcaagagcctgcgtgacgtgcttcgcggtttgaatcgccaggaaagagccaagctgacgaaagagctgctcagcatcaaccatcccagcttgaccgcgaagatgctcaagttgaggcaggcgtcgggcgaactcaccaagcgtttcacccctacgcagctcaagcacagcaccactacccagatcaaagacgtcctcggcgcaaccataggatttggcgggagtgcgtactccggaaacgtcaataccatcgcgatagggttgtacgaggaaataaacgaatgaacgagttaatgacgctacgcgactttttcaggcattactttctgacgtttcttggcggtgtattcgctgcttacttttcgttggcgttggctgtggcgctggcctttgtcacctattttcgtgatgtgccccttgctcaagtggggctcaagatcatgtctgccggggcgctgctcattctgttgacggtccatagcaactttatgattttgcggggccgcccctcctgggtgtgggtgatggtcggcatctacgtcgcctgtctactgtttgtagttccgatgattcaattccagcctcacaaaattctttatgggttggcgctgttattcccattgctcggattattgacacttaacagcaaggttcaacgagagatgcgtcagaagctgcttgagatccgccacctgcgccaagccgtgatcgccaagcgcaaaaccggctgattgggtagattccccacccaccttcacacccgcgccacaaatatgtgcgtcacttgcaccagagcatcgccgttggcgccgttttggtgctgtactgcaccgggtcccacgataaagcgcaatgaccgccgctctggcataagtcttgcgcgctttgtgtccatgccctggctcgcaggaggccgccgtgtcgattcatgtcgcgttgcaccacgttacgcattaccgctacgaccgcgctgtcgaactcggcccgcagatcgtacggttgcgtccggccgcccatagccgcacgcggattctgtcctacgcactgaaagtgctgcccgagcagcacttcatcaattggcagcaagacccccagggcaattacctggcgcggttggtgttcccggagaagaccgatgagctgcgcatcgaggtcgacctggtcgccgagatggcggtgttcaacccgttcgactttttccttgagccctacgccgaaaaaatccccttcagctatgccgccgatgaacagcgcgagctggcgccgtacctggaaaccctgccgctgacgccgaagtttgcggcctaccttgcgggcatcgaccgtactccattgccggccgtggatttcctggtcggcctcaaccagcgcctggcggccgatatcggctacctgatccgtatggaaccgggcgtgcagacgccggaattcaccctggaaaacgcctccggctcctgccgtgattcggcctggctgctggtgcaattactgcgcaacctgggcttggcggcgcggtttgtgtctggctatctgatccagttgaccgccgacgtcaaagccctcgacggcccgtccggcaccgaagtggacttcaccgacctgcacgcctggtgcgaagtgtatttgcccggtgccggttggatcggcctggatgccacctctgggttgttcgccggtgaagggcatatcccgttggcctgtagtcccgatccctcgtctgccgcgccgatcagtgggctggtggaaccctgcgagtgtgaattcacccacgaaatgtctgtagagaggatttgggaggccccacgggtcaccaagccctacaccgaggaacagtggctggcgatccaggcactgggacggcagatcgatggcgacctgctcaaggacgatgtccgcctgaccatgggcggcgagccgacctttgtctccatcgacgatcccgacggcgccgaatggaacaccgccgccctcggcccggacaaacgccgcctgtccgccgagctgttccagcgcatgcgcaagcactacgcgcccaaagggctggtgcacttcggccagggcaagtggtaccccggcgagcaactgccgcgctggtcgctcaactgctactggcgccgtgacggcgtgccgatctggcacaacagcgcgttgatcgccgatgagcgagaggattacggtgcggacggcgtgatggccgggcgtttcctggccagcgtcgccgagcgccttaagctgccggcacgctttgtgttcccggccttcgaagacaatttctactacctgtggcgcgaaggtgcgctgccgcagaacgtcactgcccaggacccgcgcctgggcgatgagctggagcgcgaacgcctgcgcaaggtgtttgcccagggcctggataaaatcatcgggcaagtactgccgctggcgcgtacgcctgccaatgatcgttggcagagtggccgctggtacctgcgcgataaccactgccgtttggtgccgggggattctcccctgggctatcgcctgccgttggcctcgcagccgtgggtgacggcggcggagtatccgtttgtgcatccgactgaccctaaccaggatcagcccgagctgccgactaccgcccaactgcaaagccatggcgaacctgcgccgagtgatgagcgcgtgcccaaggtggacgagtctgccgactggctgacccgcaccgcgctgtgcgccgaagcgcgggaagggcggctctatctgttcatgccgccgctggagcgcgtcgaggactatctggagctggtggcggccatcgaagccaccgccgaagaactgcactgcccggtcttgctcgaaggctacgagccacctgccgacacgcgcctgagcaacttccgcgtcacgccggacccgggtgtgatcgaagtcaacgtgcagccgtccgcctcttgggacgagttggtggagcgcaccgagttcctctacgaagaggcgcggcaaacccgcctgactaccgagaaattcatgatcgacgggcgccacaccggcaccggtggcggtaaccatttcgtgctaggtggcgccacgcccaaggactcgccgttcctgcgtcgccccgatctactgcgcagcctgatcagctactggcacaaccacccgtcgttgtcctacttgttttccggcctgttcatcggcccgacctcccaggcgccacgggtcgacgaggcgcgcaacgatgcactgtacgagctggaaatcgccttcgcacaaatgcctgctcccggcgaagaatgcccgccctggatggtcgaccgcctgctgcgcaacctgctgatcgacgtgaccggcaacacccaccgcgccgaattctgcatcgacaaactctactcaccggacggcgctaccggccgcctgggcctgctggaactgcgtgcattcgagatgccgccccatgcacgcatgagcctgacccagcaactgctgttgcgcgccttggtcgcgcgcttttggcgcgagccctacgcaccgcctaagctggcgcgctggggtaccgagttgcacgaccgtttcctgctgccgcacttcatcgagcaggattttgccgatgtgatcgtcgagctcaacgcagctggctacccgctgcgcgccgagtggtttgccgcgcacctggaattccgttttcccaaggtcggcgactacgccgtcagcggtatcgagctggaactgcgccaggccctggagccctggcatgtgctgggcgaggagggcgcggtgggtggtacggtgcgctatgtggattcgtcgctggaacgcctgcaagtcaaactgaccgggctgccaccgcaacgctacctgctgacctgcaacggcatcccggtaccgctgcaggcgaccgggcgcgttggtgagttcgtcgccggcgtgcgttatcgcgcctggcaaccggccaactgcctgcaaccgaccatcccggtgcatgcgcccttggtgttcgatctgctggatacctggatgcagcgttcgctgggcggctgccagtaccatgtggcccatccgggcgggcgcaattacgacagcttgccggtgaatgccaatgaggcggagagccggcggatggcgcggtttttcaggcttgggcatagccccggcaagcttcccgtaccgacggtaaccgtcaacgatgaattaccgatgaccctggatatgcggcgccaccccaataaaaatgactgaacactgtttaaatgtgggagggggcttgcccccgattgcggtgtgtctgctgtccatctgttgcctgacagtccgccatcgggggcaagccccctcccacagtagattgcagtgaatttgagttaatctgagcccccttgcccctgccgagcgttccatgtccgacttgctcgaccgttacccgctgaccgcgggcacttatcacgaactgctggacgacagcggcgcagtgcgtgcccattggcagcgcctgctcgaccacctgcaacgcagcacgcccgcacaactggcccagcgccaggcgctgctgacccggcagatccaggaaaacggcgtgacctacaatgtctacgccgaccccaagggcgccgaccgcccctgggaattggacctgctgccccatgtgctggccgccgatgaatggcagcacctgtccgccggtatcgcccagcgtgcacgcttgctcaatgccgtgcttgccgacctgtacggtccgcaacgcctgatcaaggaaggcttgctgccggccgagttggtgttcgggcataacaatttcctgtggccgtgccagggtatccagccgccggacggtgcctttttgcacctgtacgccgtggaccttgcgcgcacgccggatggccgctggtgggtcaccgccgaccggacccaggcgccgtctggcgccggttacgcgttggaaaaccgcaccatcgtgtcccgtgcctttccggatctgtaccgcgacttgcaggtgcagcacctcaccggtttcttccgcactttgcaggaaaccctggcccgccaggcgccgggtgacgaccagccgccgctgatcgtgctgctcaccccgggccggttcaacgaaagctatttcgagcacctctacctcgcccgccaactcggctacccgctggtggaaggtggcgacctcaccgtgcgtgacagcacggtgttcctgaaaaccctcagtgggctgcgccgggtgcacgcgatcatgcgccgcctggatgatgacttctgcgacccgctggaactgcgcaccgactcggccctcggtgtgcccggcctgctcgatgcggtacggcaaggcaacgtgctggtggccaatgccctgggcagcggtgtgctggaatcccccggcttgctgggcttcctgccgaagatcaacgagttcctgtttggcgaagcactgatcctgccgtccatcgccacctggtggtgcggtgaagcgccggtactggccgaggcgctggagaaactgccggagctgctgatcaagcctgcgtttccgtcgcagagtttcaccccggtatttggccgcgacctggacgacgcacagcgccaggccctggccgagcgcatgcgtgcgcggccctacgcgtacgtcgcccaggagctggcgcagctgtcccaggcgccggtgtggcacaccgtcgatgaccacctgcaacaccgtgccatcggcatgcgggtgtacgccgtggccagcgatgagggctatcgcgtgttgcccggcggcctgacacgagtggccgccgaagccgatgccgaagtggtgtcgatgcaacgcggtggtgccagtaaagacacctgggtgctcggcgagcgcgcttccggtggtgaacattggcgtgcacagcgcgcaatcggcgcccatgacctggtgcgccgcgatccttacctgccgtcccgtgtggtggaaaacctgttctggttcggtcgttattgcgagcgctgtgatgacagtgcgcgctggctgcgcatcgtgctggcgcgttatgtggacggtgacgatccgctggccttgcaggctgccgtcgagctgggcgagaacctgcgtttgctgccggaagagggcgagttgccggaacgcctgctggcggcgttgctcggtgacgactggccctcaagcctgcgcgccaacctgcaacgcttgcagtgggcggcgtcccaggtgcgcggcaagctgtcccgggagaactggcaggccctggtggagctgcaacgtgaagccctggagctggaaagcgagtcaccggattttggcgagttgctggactttctcaaccgcctggtaatgtccctggcggcgctgtccgggttcgccctggacgacatgacccgcgacgaaggctggcgcttcctgatgatgggccggcgcatcgagcgcctgcaattcctcagcagcagcctggcggcattcctgcgcggtgtggccgtgttcgatcaggccgggttggagtggttgttggaattgggcaacagcagcatcacctatcgctcgcgctacctggcggtgccgcagttgatcccggtgcttgatttgttgctgctggatgaacagaacccccatgcggtgctgttccagctcaaactggtgagccgcaccctgcgccgtctcaacgatgactttggcgtgccgcgtgaaaccggccttggcccgttggtggagcgcctggcgcgcttcgacctgggctgcctggagaacccgctgttcggcgaatccagcgtgcgtgccgcgctggacggcctggccgacctgctgcaagcggtggccgatgagagtgggcaagtgtcggatcgcctggccttgcgccattttgcccatgtggatgatgtcagccagcaaacggtgtcggtgtgatgagtgcgcgctaccagattttccacgatacccattaccactacgacagcccggtgtcactggcccagcagctggcgcacctgtggccacggccgtgcgcctggcagcgctgcagctcgcagcaactggatatcagcccgcagccgtcgtcgcgccgcgatgagctggacgtgttcggcaacccgatcacccgcctggcattcgagcggccccatgacgaactgctggtcaatgccgggctgaccgtggaagtgctggcgcggccggtgctggatttccagcaatcgccggcctgggaccagacccgcgaccgcctgacttacagcagccagccgatgccaggcgagttgatcgaagcctgccgctatcgtttcgaatcgccctacgtgcacctgaagaaaaccttcgtccagttctccgaaagctgtttcccgcctggcgcgcctttgctgctgggcgtgcaggcgttgatggaaaaaatcttcagcgaattcaccttcgatgccgaagccacccaggtcgccacgccgctggtggaagtgctggagcgccgtcgcggcgtgtgccaggacttcgcccacctgatgctcgcctgcctgcgctcccgcggcctggcagcgcgctatatcagcggctatctgctgacccagccaccgcccggccagccacggctgatcggcgccgatgcgtcccatgcgtgggtctcggtgtattgcccggtttcaggctgggtggactttgatccgacgaacaatgtgcagccggcactggagcacatcaccctggcctggggccgggacttttccgatgtgtcgccgttgcggggggtgattctggggggagggagccatgacccggaggtgcgggtgacggtgatgccgctggaatgatggttgattgtgccgagccggagcagccggctcagcacaaaggaaattattcagccggatcttttggtgtttcgctctcgtcgctcgttacttcagcatctgcatccgggttcagtgcgccggcctcttcgtctgcagcggctttcttgcgttgcagtttttcctctttcttctgttccttggccaagtctctctgacgtttggcgaaggagtaattaggtttggccatgggcgatcctctagggtcgaaggtgagggtggcggcgcgcagctgccttgggctgccatggtagcagcttagcaccgcgcttggccttcacttaccgcaggcgtaggcggccagcaggccgttgaacagttgattgaggtgcatggctcgggctccagtgggtgatgggccgatcataatcagcgtgcggcactttggctggttgattgtgtcgataagtctgatagcctaaagttgtatacaatctgttgattcaggtcataagaatttctgcctgcttcaggcacccttgtcgcattacgcgttttttaaaccctgccttggagattcacatgtttgccaaactcgttgctgtttccctgctgactctggcgagcggccagttgcttgctgcagagtgcaaggtcactgtcgactccaccgaccaaatgtccttcaacaccaaagccatcgaaatcgacaagagctgcaagacattcaccgtcgagctgacgcactctggcaacctgccgaaaaacgtcatgggccataactgggtgctgaccagcgccgccgacatgcagccggttgccactgacggcatggccgccggtatcgacaagaactacctgaaagacggcgacacccgcatcatcgcccacaccaaaatcatcggtgccggcgagaaagactcggtgaccttcgacgtgtcgaagctggccgccgggactgactacgcgttcttctgctcgttcccaggccacatctcgatgatgaaaggcactgtgaccgtcaagtaacaccgcatcatcgttcatcgggggcaagccccctcccacattcaaccgcattctcatgttggaactcggtcaactgtgggagggggcttgcccccgatggcgtcttgacaatcaacacgaaactttcggcttcaccttatggcgcaaacggcatgacccgcttgtgctccgtcttgcgatacgtctcgcagataatcctgaacgcttcctcacgtaccggctcgccgtgcaggaacgcatcgatctccgcgtaggtcacgccatgtgacgcttcgtccggcttgcccggcgacaggtcttccaggtccgcagtaggcactttttccaccagcgactccggcgccccaaagtgccgcgcaatcgcacgcacctggttcttcaccagcccgctcaacggtgccaggtcgcacgcgccgtcaccgaacttggtgaaaaagcccatcaccgcttccgccgcatggtcggtgccgatcaccaggccaccggctgcgccggcgatggtgtactgcgccaccatgcgcatgcgcgccttggtattgcccagcacgaaatcgcgggacaccgccgccttgccttcaaatgccgcgacctcactggccagggctttgaccgccgggccaatgttcacggtgtggcgctcgtccggctcgataaagtccaccgaggccgtggcgtcgatttcgtcgaactgggtttcgtaaggcaggcgcacggcgataaagcggtaagcctcatcacccgtgctttcacgcagttccttcattgcacgttgggccaagaggccggcggtcagggagtcgacgccaccgctgatgcccagcaccagcgccttgagcccggacttgcgcaggcaatcctggataaacgccacgcggcgggcaacctcggcctcaagggcggcctggtcgttgaacggcgcttggaccttgagctgctgcgcaatctcacgctgtacggcttgcatgattcactccttgcttggtagggcaggtactttgaaaacgtgacgcaaataggcgacgaaattcgggtcggtgcagtgggtcttgcccgcttcatcggagatctttgcgacgggctggccattgcaggccgtcattttaagtacgatgctcatcggctcgacacccggaatgtcacaggtcaggttggtgccgatgccaaagctcacattgatccgaccacgcagcgcgcggaatatttccagggccttgggcagcgagaggctgtcggagaacaccagggttttgctcatcggttcgatgccgagcttgtggtagtgggcgatggctttttccgcccactgcaccgggtcaccggagtcatggcgcaggccgtcgaacagcttggcgaagtacaagtcgaagtcgccgaggaacgcgtcggtggtgatgcagtcggtcagcgcaatgcccagcaggccacggtattcgcggacccagcagtccagcgcggcgatctggctgtcgatcaggcgtgggccgagttgctggtgggccatgatccattcgtgggccatggtgcccagcggcttcatgtcgaactcgcgggccaggtgtacgttgctggtgccgacaaagcgcccggggaagtcatgcttgagcacgctgaccacttcttcctgcacgcggtacgagaagcgccggcgcgtgccgaagtcggccacttgcagctcggacagctcgtcgctgctggcgttggcggtcagccagtcgaacttgcggtacagctgttcgcgggcctgttcgaggatcaccgtctggtagcgatagcgattacgcacttcgctgacgatggccagcatcggcacttcaaacagaatcacatgcagccacggcccgcgcaggcggatgaacagctcgccgttctcgatgccagtctgcacgtagcgcagattgaagcggaacagcccaaggaaacgcaaaaagtccggcttcatgaagctgatacgctccaggaagcccagttgatcggggctcaggctcaattcggcgaggcgttcgatctggtagcggatctccgccaggtacgggcgcaggtcttcgctgttacggcaacggaactcccattcaacttccacattggggtagttgtgcagcaccgcctgcatcatggtcagcttgtagaagtcggtgtcgagcaagttctgcacgatgcgatcggcaaacacactctcgctcataacgggaatctccagacgggacggcgatgggcgccgacctttacgcacaattaagaaaggggactagtggcgcatagacgtgggtcggtttgccagtgttttttcagtcggcatctagctgctccatcatccacttcacaaaatcacgcacttttggcacctccgccgaatgctccgggtaggccaggtaataggcgtcctggctcggcatcgcatgttgccaggggatcaccagtttgccctcggccagttcctctgccaccaggaagcgcggcagcaaggctacgccgcagcccacctgcgccgcccgaatgcacatatagaaggtatcgaaacgtggcccgtggtagctgtgttcggtctggtaaccctggctggcgaaccagtcatgccagccctgggggcgcgaggcgttttgcagcagcaccaggtcgctgagttgcgtggggtcggtgaagggccgcgccggcaggctttccggtgcgcacaccggcaccagttcttcgctgaacagcttcaggctctcggtgccagggcgtgaaccctggccgaaatagaaggccatgtcggccttgccttgcagcagctcgtccggctcctgctcgttgcacaggtccaggtggatctgcgggtgacgcagccgccagcccttgaggcgcggcaccagccagcgcgcgccgaaggtgtagggcgtggacacgcgcagtacttcggtctcgccgccgtaggaacgcaggtagtgggtggacatctccacctgggtgaggatcttgcgcacttccaccaggtacaggtcgcctgccggagtcatctgcaaacggcggcgcacccggcgaaacagcaggtgttgcagcaattcttccaactgcgccacctgtttgctcacggcgctctgggtgagattcagctcctcggcggcgcgggtaaagctcaggtggcgggtggcggcttcgaagcactgtaaggcggtgatcgagggcaaatgtcttttgttcagcacggcgtgcctctttttatgctttgcatgaataaacggaatgatatctcgcctaatcgtcgtttgttggcaagtcttgggccagctacaaataaggcctggatcgccgtgtgtgtgacggtgcgaattttctgtttgaaattgaaggagtgacccatggttgccgcattgcttgatcgtctcggggtaaacccggcgttgtaccagtcgggtaaacaacctgtgcattcgccgatcgatggcagccgtatcggcagtgtgcactgggaaggcgccgccgaggtggagcaacaggtcagtcgcgccgagcatgcattcgaagcctggcgcaaagtgcccgcgccgcgccgtggcgaactggtgcgccaatttggcgatgtgttgcgtgaatacaaggccgacctgggcgagctggtgtcctgggaagccggcaagatcacccaggaaggcctgggcgaagtgcaggaaatgatcgacatctgcgacttcgccgtcggcctgtcgcgccaattgtacggcttgaccatcgcctccgagcgcccgggccaccatatgcgtgaaacctggcacccgctgggcgtggtcggcgtgatcagtgccttcaacttcccggtggcggtgtgggcgtggaacaccgccctggcgctggtatgcggcaacgcggtgatctggaaaccgtcggaaaagaccccgctcaccgccctggcctgccaagcgttgttcgagcgtgtactgaaaaaattcgacggtgccccggagtacctgagccaggtgatcatcggcggccgcgacgccggtgccgcgctggtggacgacccgcgcgtcgccctgatcagcgccaccggcagcacccgcatgggccgcgaagtggcgccgaaagtcgccgcacggttcgcccgcagcatcctggagctgggcggcaacaacgcgatgatcctcggcccaagcgccgacctggacatggccgtgcgcgccatcctgttcagcgccgttggcactgccggtcagcgctgcaccaccttgcgtcggctgatcgcccatgaatcggtcaaggaagaaatcgtcacccgcctcaaggcggcctattccaaggtgcgcatcggccacccgctggaaggcaacctgatcggcccgctgatcgacaagcacggcttcgacaacatgcaggacgcgctggaacaggccctgagcgaaggcggcaaggtgttcggcggcaagcgccaactggaagacacattcccgaatgcctactacgtgtcgccggcgattgtggaaatgcccgagcaaagcgatgtggtgtgcaccgagaccttcgcgccgattctctacgtggtcggctacaccgacttcgccgaggccctgcgcctgaacaacgccgtgccccaaggtttgtcgtcgtgcatcttcaccaccgacgtgcgtgaagccgagcagttcatgtcggcggtgggcagcgactgcggtatcgccaacgtcaacatcggcccgagcggcgcggaaatcggcggcgcgttcggtggggagaaagagaccggtggcgggcgtgagtcgggttcggatgcgtggcgcgggtacatgcgtcggcagaccaatactgtcaattactcgcttgagctgccattggcacaaggcattacattcgactgattctgctggctggaatgagatcaaaatgtgggagggggcttgcccccgatagcggtggatcagctgtacatctgtgggctgacacatcgcgatcgggggcaagcccccgcccacatttgaccgagctgtttgttaggtttcatcacggagtctggcaatgccattacgcgaaacatgtttatgggaacacctcacccccagccgtccggatcgcgctgcgctcaacggcgaggtcaaggtggacgtgtgtgtgatcggcgccgggatcaccggtctgtcggcggccattcatttgctggaacagggtaaaagcgtggccgtgctggaggcgcatcgcactggccatggcggttcggggcgcaacgtggggctggtcaacgccgggatgtggattccgccggacgagatcgaagccggtttcggcgaggcggtgggcagccagctcaaccgcatgctgggcgcggcaccgtcgctggtgttcagcctgatcgacaaatacaacatcgattgccagttgcgccgtgagggcaccttgcacatggcgcacaacgcccgtggcgaggcggacctgcgcagtcgtgaagaacagtggaagcgccgtggcgcaccggtggaactgctcaccggccaggcctgcgagcaggccacgggtactaaaaaaatcgccgccgccttgctggaccggcgtgccggcactctgaacccgatggcctacaccagtggcctggccagtgctgccgccgggctgggcgggcagttgttcgatcattcgccggtcactcaacttgagcgccaaggtgcgcagtggtcggtgcagaccgcccagggctcagtgcaggctgcacaggtggtcatcgcctccaacgcctacacagaaggtgagtggactgaactgcggcgcaattttttccccggttattactaccaggtcgcatctgccccgctgacggacgccgccgccgaacagattttgcccggcggccagggctcctgggatacacgccaggtcttgagcagcatccgccgcgacgccgacggccgcctgttgctcggcagcctgggcaacggcaaccagaaacccacctggttcctcaaggcgtgggccgatcgggtgcagcagcattacttcccgcacctcaaatcggtgcagtgggaatacacctggaccggctgcatcgcctttaccccggaccatttgatgcgcctgttcgagcccgccccgggcattgtggccgtaacgggctataacggccgtggcgtgaccactggcagtgtggtcggcaaggcgtttgccgactatttgtgtcaccagaatccccaggccttgccgattccctttgcgccgatgcaaccgttgtcggcagtcgggttacgcagctgtctttatgaggcgggtttctcgctgtatcacgccggccaatgcctgaggatcgtgatctgatcagcgaaataccgctcaaaagcctgcattttcttagcaggctactaatctgtattggtgcaagtcgtagcagtcgcgcactgtaaatgtgcagttccgttacgccggctgttacagctgtaggaactgtcgtttataggtttggttgcaggtgcgacctgccgaggttgtactttttcgatccattggttgcacctctggacgctagagggttgcacgtactggcgaacggagccgaaacgcctgcaataacaatgacaccgtgtctttttgaagaataaaaacctaatggcacgcgctttgctctgggctttcagtgaaaagtttgaacgcaagttgtcgtgccaaaaatcaaaaatatcggagcaccactcatgtcccagacgttttacaagaaaggttttctggccctcgccgttgcagcggcgctgggtgtttctacgtttgttcaagctgatgtgaagattggcgtggcgggcccgatgacgggtgccaacgctgctttcggtgagcagtacatgaaaggtgcccaggcggcagccgatgtgatcaacaaggccggtggcatcaacggcgagaaaatcgtgctggtggccggcgacgacgcctgcgaacccaagcaggctgtagccgtggccaaccgcctggcggaccaggacaaagtgatcggcgtggtcgggcacttctgctcctccaacaccatcccggcgtccgaggtgtatgacgaagccggcatcatcgcaatcaccccaggctccaccaacccacaggtgaccgaacgcggcctgggcgccatgttccggatgtgcgggcgtgacgaccagcaaggcatcgtggccggcgactacatcgtcgatgtgctcaagggcaagaaagtcgcggtcatcaacgacaaggacacctacggcaaaggcttggccgacgccaccgctgcccagttgaccaagcgcggcgtcaagccggtgctggaagaaggcctgacccgtggcgagaaagacttcagcgccctggtcaccaagatccgctccaccggtgccgacgtcgtgtacttcggcggcctgcacccggaagccggcccactggttcgccagatccgtgaagcgggtctgaaagacgtgaagttcatgtccgatgacggcgtggtcaccgacgaactggttgccaccgctggcggtaagcaatatgtcgacggcgtgtacatgaccttcggcgccgacccgcgcctgctgccggacagcaaggcggtggtggaagagttccgcaagaacggcaccgagcctgaaggctataccctgtacgcctacgcgtcgctccaggccctggccgccggcttcaacggcgccaagtccaacaagggcgaagacgctgccaagtggctcaaggctcacccggtgaaaaccgtcatgggcgagaaagcctgggattccaagggcgacctgaaaatctccgactacgtggtttaccagtgggataaagacggcaaataccatcagttggaaaagcagaagtaagactgagcgccgccgttccaatgtgggagggggcttgccctcgatagcgcagtgtcagccaacgcatgcatgactgacgcaccgcaatcgggggcaagccccctcccacagggggagtggtgttgttattgaaatctgttttttcctccagaagcgccgcacacctcccggtgtgcaggtgctcaccgcgtgagattgcgttatggatggtattttcctgcagcaactggtcaacggcctgaccctcgggtcggtctatggcctgatcgccatcggctacacaatggtctatggcatcattggcatgatcaacttcgcccacggcgaggtttatatgatttccgcttacctcgcggcgatcagtctggcactgctggcttacttcggcatcgaatccttcccgctgctcattctcggcaccttgatcttcaccgtggtcgtcaccggcgtgtacggttgggtcatcgagcgtgtcgcctacaaaccgttgcgcaactccacccgactggcaccgctgatcagcgccatcggtatctccctgatcctgcagaactacgcgcagatcgcccagggcgcgaagcaacaaggcattcccaccctgctggcaggcgcctggcgcgtcgatttcggcacagggttcgtccagctcacctacaccaaggtcttcatcctcgtggcggcgttcgccggcatggggttgctcacctacgtgatcaagtacaccaagctcggccgcatgtgccgcgccacccagcaagaccgcaagatggcctcgatcctcggcatcaacaccgaccgggtgatctcctatgtgttcgtcatcggcgccgccatggcggcattggccggcgtgctcatcaccctcaactacggcaccttcgacttctatgccggcttcatcatcggcatcaaggcgttcaccgcggcggtactcggcggcatcggctccctgcctggggcgatgttgggcgggatcatcctcggtatctccgagtcgctgttctcggggttgatcaactctgactacaaagacgtgttcagtttctccctgctggtggtgattctgattttccgtccccagggcctgcttggtcgcccactcgtggcgaaggtgtaaacatgtctgctgccaaatcaatcgatatcaagaaaagtgtggtcgatacgatccttgccgggctgatttcgctgatcgtgttcggtccgatcgtcggcgtggtactcgacggctacagcttcaacctggaaccggcccgcgtcggcctgctggtggccatcgtgatggtcggccgctttgccatgagcctgttcctgcaaacccccaagggcctgaagattttgcagggcttcgagagcagcggctccggcgtgcatgtgctggcgccggactacaagtcgcggctgcgctggatcatcccggcactgatcgtgatcgccatcgtgttcccgatcttcgccaacaagtacctgctcaccgtagtgatcctcggcctgatctacgtgttgctcggcctgggcctcaacatcgtggtaggtctggccggcttgctcgacctgggttacgtggcgttctacgccatcggcgcctacggcctggcactgggttatcaatacctgggcctgggcttctggaccgtgctgccattggcggccatcgcggcggcgctggcggggtgcatactcgggttcccggtgttgcgaatgcacggtgactaccttgccatcgtgaccctgggctttggtgagatcatccggttggtgctcaataactggctgtcgtttaccggtgggccgaatggcatgccggtgccttcaccgaccttcctcggcctggagttcggcaaacgggcgaaggatggcggggttccgttccatgagttcttcggcatcgactacaaccccaacatcaaattcctgttcatctacatcgtgctgttcctggtggtgctggccgtgctgtatatcaagcatcgcctgacccgcatgccggtcggccgcgcctgggaagccctgcgcgaagatgaaattgcctgccgttccatgggcctgaaccatgtgctggtcaagctctcggcgttcactatcggtgcatcgacggccggtctggccggggtgttctttgccagttaccagggcttcgtcaacccctcgtcgttcaccttcttcgagtcggcgctgatcctggccatcgtggtgttgggcggcatgggctcgacggtgggcgtggtgattgcggcgtttgtgctgaccgtcgcacctgagttgctgcgcagcttctccgaataccgcgtgctgctgtttggcgtgttgatggtggtgatgatgatctggcgaccgcgaggtctgatccgcatcagccgtaccggtgtgacaccacgcaagggggtagcgccatgagcaaggaagtcgtcctctccgtggaacacctgatgatgcacttcggtggcatcaaggccttgagcgatgtgagcctcaaggtcgaacgcaactcgatcttcgccctgatcggccccaacggcgccggcaagaccacggtgttcaactgcctcaccggcttctacaaagccagcggcggcaagatcgaactgaacatccgcggcaagcagaccaacgtgatccagttgctcggcgagcgcttccagccgaccgacttcgtgtcaccgaaaagcttcttcagccgtatgtactacaagatgttcggcggcacccatctggtcaaccgtgccggtctggcccggacgttccagaacatccgcctgttcaaggaaatgtcggtactggaaaacctgctggtggcccagcacatgtgggtcaaccgcaacatgctggcgggcatcctcaacactaagggctaccgcaaggccgaaagcgacgccctcgaccacgccttctactggctggaagtggtggacctggtggactgcgccaaccgcctggccggtgaactctcctacggccagcagcgccgcctggaaatcgcccgcgccatgtgcacccggccgcagatcatctgcctggatgaacccgctgcgggcctcaacccccaggaaaccgaagccctcagcgcgatgattcgcctgttgcgcgacgaacacgacctcacggtggtgctgatcgaacacgacatggggatggtgatgagtatttccgaccacatcgtggtgctcgaccacggcaacgtgatcgccgagggcgggccggacgcgattcgcaacgacccgaaagtgattgccgcctacctgggcgctgacgaagaggagctggtatgagcgcacctatcctcgaaatgaaggacctggatgtgtattacggcccgatccaggccctgaagaaagtctcgctgcacatcaacgaaggtgaaaccgtcagcctgatcggctccaacggcgcgggcaagtccacgctgctgatgtcgatcttcggccagccacgggccgagtcgggggagatcctctacaacggcgtcgacattacccacaagtcgtcccactacatcgcctccaacggcattgcgcagtcgccggaagggcggcgggtgttccctgacatgaccgtcgaggaaaacctgctgatgggcaccatcccgattggcgacaagtacgctcaggaggacatgcagcgcatgttcgagctgttcccacggctcaaggaacggcgtacccagcgtgccatgaccatgtccggtggcgaacagcagatgctcgccattgcgcgggcactgatgagtcgtccgaagttgttgctgctggacgagccgagcctgggcctggcgccgattgtggtgaagcagatcttctcgaccctgcgcgagctggcggccaccgggatgactattttcctggtggagcagaacgccaaccatgcgctgcgcttgtcggaccgcgcatacgtgatggtcaacggcgagatccgcctgaccggcactggcaaggagctgctggtcaacgaggaagtgcgcaacgcctacctcggcgggcactgatctaaataacgacgcggtccccctgtgggagggggcttgccccctcccacattaagccgatccacatgtatttttgtggtgtgaatagggttgccgccaaattgtggaaaacaaatccagccctcctccaaagcgcgacatatagccgccgcaaatccctgttttgtcacagttttgacttgtccccatccgctgtggaaccggctgtgggtaacgtgggagtagctggctgaaagccaacaaacacgcggcctgtagcgcggtgattgttttttgatcagcgggtttttgggtaccgcccgagcccgttgtcaacctgtttaaagacacaggtatatgactggaatatgtcccggcagcctgtggataagtctgtgactaaactctggaaagaccgccgcagaggccggaatgactggcctggagccatcgttctggtttgccgttcgtagaagggcctacatacgcaccggccaaggtcaagcaaaaaactttctaaaaccgcctgcaacccttgtgtatagaggcctgaggcattttgcacttgcccccaaagactgtgggcgcagttgtggataacctgcgcgcatatggctgtaagccacggtctataaggctttgctttaagtggttaaaaagtgatcaggcatgtgttaacttgcgtgcccagtagttgccgacatcgcggcgtacgggcattctgctggctgtttttttcccgatgcccgcaaggagaacaccatgtccgacacgctgtttattagtggcgcaacctcaggtttcggcgaagcctgcgcccgtcgttttgccgaagccggctggaaactggtgctcaccggtcgtcgcgccgaccgcctgaatgcattggtcgaagagctttccaagcagaccgaagtgcatggcctggtcgtagacgtgcgtgaccgcaagggcatggaagacgccatcgccaacctgccgccctcgttcgccacattgcgcgggctgatcaacaacgccggcctggcggtgggtaccgaccctgcacccaagtgcaatctcgacgattgggaaaccatggtcgacaccaacatcaagggcctgctcaccaccaccagcctgctgctgccgcgcctgatcgcccatggccgtggcgccggcatcatcaacctcggctccatcgccggcagctacccgtacccgggcagccatgtgtacggcggctccaaggcgttcgtgaagcaattctcgctgaacctgcgttgcgacctgcagggcaccggcgtgcgcgtcaccaacatcgagccgggcctgtgcgagagcgagttctcgctggtgcgttttggcggtgaccaggcgcggtatgacgcgacttatgcgggggccgagccgatccagccgcaggacattgcagataccatcttctgggtgatgaacacaccggcacatgtgaacatcaaccgcttggagctgatgcccgtgagccagacctgggctgggtttgcgattgagcgtggggccaagtaaggctttaaaccgcttcgctgccatcgggggcaagccccctcccacacttgaccgagttcagcatgtgaatgcggtcgaaggtgggagggggcttgcccccgatggcgtcagatcggccaaaacaggccataaggtacactcacctcctgaaaacccctccgcactctgcggattcaaggtttttgacgggaggaaatgtgagtaaccgaggtgagcaggcactgctcaaacaatcgaccatcctgatgttcgccgtggcgatcgccgggattgtcacgggtgtggtatccggcgcccagtccattctgttcgacggctttttctcgctgatcgccaccgccatcaaggtgctgatgctgatcacggccaagctgatcgccaagaaaagcaacgagcgcttccagtttggctactggcacctggagcccatggtgctgctgatcgaaggcagcttcctgttgttgatcgccatctacgcgttcctcaacggcgtgttcggcattatcaatggcgggcgcgagatcgagttggggctggtgatcatctatgcggcggtgtttaccgtcgtcgagttcggctatttcttctacgtgcgctaccgcaatcgcacgctgagatcatcgctgatccagttcgacaacatcagttggctggtggacgcgatgctctcggtgggcctgctgatcagctttctggcggccctgctgctcaagtcccagggctatggcgaatgggcggtgtatgtcgacccgttgatcctgatcctgctggccctgagcatgctggcgccggcgttcaagattttgcgcccggcgttgcgtgaggtgctggggattgcgccggaccacctggacgacaaggtgcgcgaggtcatggacgcggcacaggccaaacatggtttcgacgactacgtgtcctacgtgcaaaagcacgggcgcgcacggtttatcgagattcatgtggtgttgccggcggattacccggtggacaacgtcgcgaccctggatgggttgcgcgaagagatatccacagggctcggcacgccggatgcggcgcgctggttgacgatcagctttaccggagatcgcaagtggattgcataaggccctggtaacaggtcgccaagtgatacggcgtggtcgacggcatatcccgtcggctcaccgcgcccttggcatccaggcattcatgccagcctttggcatgcaaaaagtgctgttgcagcgccagcaactggcgctgtaaccgcgcttcgctgtcgggccgcaaggtcagtgcccgcaggtactcggcctgggcccagatgcgctgggtgctgtcacgcactgtgccatccagcgccaacatgccgctgacggcgccactctcgttatccacacccttgagttcggcgtaggcgaaggcccgtgtcagggaggcatgcaacggcgtaccgcgcagtacttcggacgactccagcaagaagaaccactcgaactggtgccctggctcgaaccagttatccacagcacccagcggtttttccatcatcacgccgtgctggcggtcgatgaagcgctgctgcatggcgttggccaggtccagcagggcgtcctgcgtgatggcgtcgtcgcgcacggccagggtggcgaggaagccttcggcgaggtgcatcagcgggttttgcagggggccggacttgacggatgaccagttgcgttccagcaccgcttcgtacaggccgtcgcctgtggaaaaccgttcggcgaccactgccagggcggcattgagcacagattccaccagcggctcacgcaccttggcccagtaatgggcgcaggcgaagatgatgaacgcgtgggtgtacaggtctttgcgcttgtccagcggtcggccggcggggtcgatgctgtagaaccagccgccatgttcggcgtcgtggaagtgccgttgcagcgagcggaacaacgccgccgcacgttcttcggcaaaggccgcatcgggtccgccgatcaggctggcgaacaggtacaactgccgggcgcaggccatggcgcggtagcgttgcgggggtaatggccggtggtcggcgtccagcgcctcgtagggcaatgccaggtcggcattccagccggggccttgccagagcggcacgatcaggctgtggaagtgcgtgagcacggtgttcaaggagggttgggaagcgctgggcattggctggcgtcgtcacggcaggggtgtaggcgcgcatggtagcaggcttgggttctgtggtgtctggtctagcgctatcgggggcaagccccctcccacaaggtgggagggggctt

SEQ ID NO: 47 - DNA, 192068 bp, Pseudomonas nodulensis
ctcccacagttgaccgcattgacaaggtgggagggggcttgcccccgatgaggccgtcaaatacgccgcaaatcagcctgccaacaaccagaccccggtcgccgccgaagccgcccccgcaacccgcaccaacggcgccgccgccgccggcaggaagcgcaccaccgcgtaaccggcagcatgcagcactgcggtcgcagcaacaaaacctgccgcgtacgcccacgggctggacatgtccggcagctccaaaccatgggccacgccatggaacagtgcgaacaaggctgtcgcgccgaccgccacgaacaacggcggacgcaccgccagcgcgactgccaggcccagggccagcaccgacgcggcaatcccgctttccagcgccggcaacgccaggccttcaaaccccagcacgccgccgatcagcatggtgcccacgaaggtgcacggcagtgcccagcgcgcggcgcctttttgttgggcggcccacaagccgacggcgaccatggccaacaagtgatcgataccgctcaggggatggctgatgccggccaccaggccgttgtcgccgtggcccgggtgggcgaaggccagggcaggggccagcagcagggcggcggcggtcagcagtttcttgaggttcatggacaggttccttatgggttgatcaggcggcggtcagcaggccttggcgttcgatgaaggcgacgatgtcatccaggccgacgccggttttctggttgctgaacacaaagggtttaccgttgcgcatgcgggtggtgtcgctgttcatcagctccagcgaggcgccgaccagtggggccaggtcgatcttgttgatcaccagcaggtcggacttgcagatgcccgggccgcccttgcgcggcagcttgtcgccggcggacacatcgatcacgtagatggtcaggtccgacagttccgggctgaaggtcgccgacaggttgtcgccgccggattccaccaggatcaggtccaggccggggaagcggcggttgagctggtccacggcctccaggttgatcgaggcgtcttcgcggatcgccgtatgcgggcagccgccggtttccacgccgatgatgcgttccggcgccagggcctggttgcgcaccaggaagtcggcgtcttcgcgggtgtagatgtcgttggtgaccaccgctaggttgtagcgatcgcgcagcgccaggcacaaggccagggtcagggcggtcttgccggagcccaccgggccgccgatgccgacgcgtagaggttgtgcgttcatgtgtgttgtctcctaggaacggaacaggcggctgtattggcgctcgtgggccatgcacgccagggacaggccaaaggcggcgctgccgagttgatcagggtcgatgcggctggcgtcctgctgggcgtgttgcaacagcggcagcagttcgctggtcaggcgttgggcggcttgctggccgagcggcagggttttcatgagcaccgccaattggttttccagccagctccacagccacgcggcgagggcgtcggcggggctgatattccaggcgcgggcggccagggcccagcccagggcgaggtgaggttcggtgcactgttgaagaaaggtgcgggccgcgtcgtccaactcgggcaggccattgagcagttgttgcagggagtagcccatctgccggctttcctgatacagctcgcgggtttcacggctggcgcggtgttcttcacccaactgcgccagtcgcgaccaatctgcctccagggcggcctggcaatgggcgagcagcaacggtgcctcgaaacgcgcgaggttgagcagcaactggtcgctgatccagcggcgcgcagtggccgcatcgttgacgcggccgttctcgacggccatttccaggccttgtgaatagctgtagccgccaatcggcaattgcggactggccagacgcagcagcgcccaggctgggttcatagacgcacgccgaactggtgcagcttgggtgggtagttgaagtcttcatcaccatggcgcgaatgatgatggccgccaccataggcaccatgctccggctggaagggcgcttcgatggtttccgtctgtgcacccaactgttcgagcatggccttgagcacgtagtcgtcgagcaggcgcaaccagccgtcacctacttgcaacgccacgtggcgattgcccaggtgataggccgcacgggtcagttcgaatgcactgctgcaggtcacgtgtaagagttgttcaggccgggcgcacacgcgtacgacgcgtccgtcttcagcctgcagaaattcaccatcgtgcagcggtggctggccgcgctccaggaaaaggccgacgtcttcaccgtcggcactgaaacagcgcaggcggcttttgctgcgggcttcgaaattcagcagcaactcggcggcccagagggcttggggggcgattcggcggtggatcaccagcatcaggcagcttccagctatgagcgatgaaacagctagagcaaggggcttgccaacctcgtcgaggcgtaggaaatgcctgtaggtatgcggggtggcgccactaaatagggcgtgaagacattgcgtgtatgcgccaagttggtgcaagagattgcctgttgcacgcggggtgggcgttttcggattttccctacatggtctgaggaatcggcgttcatcaggttacctgcgagatctttagcctgtgcgtcgtgttttatccacagcgacgttcatcatgttcaagtcactttgttatctattcattgtcagcctgacgtttgtgctttctccggcctccgccaacttgcaacaccctgcctctttctccgtttcactgaaagaggcatccatcaatgatgtgatcgaccgtgcccaccaactgctgggaacgccctacaaatggggtggcacctcggcggatcagggcttcgattgcagcagtttcctggtgtatctgttcaagacccaagccaatatccagataccccgcacgacggtcgcgatgcaccgctccacggccccgaccatcaaacgcaacgcgctcaagcccggcgatgcggtgtttttcaaggggaatgggcgcggccaggtcagccatgtgggcctttacatcggtgaggacaaatttattcattcgccgcgtaccggcaagagcatccgcatcgattcgttgagcaacagctactggaacaagaactacaccacggccaagcgcttccactcggcgggatgatggcgttactcggtgctgcccaggccttgccagtgcttcaaaccgataaagatgaagcgcagttgctgggtgattttcgcctgaggcgtgaggtggtcaggcagggcctgggccggcgggtcgatgatgtcgggcagggtggcgaacacacttttaacgatcaggtcagccatcacgtgcaaaccttcggcatccaggtgctgcagcttgggcatcagggtcaggtcggctgccaggtcgcgggtgatgtcttcgcgcaaggcgccgatcgcttggcgcaccgcgaggcagccaccgtattgttcacgggccaggaacaggaattgcgaacggttggccgagaccacatccagaaagatccgcacggaggcatcgataatgccgcccatcacgaattcgttgtggcgcaccagacggatcgtggcgcggaaggtttggcccacttcgctgaccaggacgagcccaagctggtccatatcggcaaaatggcggtagaaaccggtaggcacgatgccggctgtcttcgccacttccctcaggctcaggctgccaaacccacggccacactccatcagatggcgggctgcgtccatcaaggcgaggcgggtctgttgcttctgttcggcgcggggcagcattggcaggcgggctttgtcggcaagtacagcgacgcactctagcaaaacagcttcgctggcgtcgaacttggcggggagggcttgcgtaacagtctctacaaaaagtcaaaagcccgatcggctgatcgggcttttttctgggccaccacggggttagctctgtgcttgatgcagttcttgcagacggtcagcgccgccttcggcaataccttgggtgtaggcacgctcgttggcttgttcagcgccaccttcaaccaggcctttctgttccagacgatcacggccaccttcggcgacagcgttgcgttccagcaggcgatcagcgccaccttcaaccagacctttctgttccaggcggttgcgaccgttttcggtcaggccttcggtgtaagcgcgtttgttggcgtgttccgaaccattttcagccacagcgcctttggcgtagtcacggttttcttcttcttgcgaaccgctgcgagcgacggtctggctgaaatgagcggcgtcggctttgacttgtggggtggcctgttcggcggctggcagggcaaaagcactggaagccaggatggataacaggacggtagcgagtacttgacgtttcatgatgggttgctccttgggagggcgataaagtgggtacagggctaatgctactctcgataagtcgatataaaagttcataaacacaatggtaataatcaacagaattgattgttctaggcggaggctctagaacgggcctctcaagcacgcggttttgcaccggtgtgggtattttcgacacgcgagtgggtaacaatggtgcggtgccgtagggtaaatctgtcgaagtggtcagaaaatgaggtttttcctggcaaatcgaggattgggttaaaccccgcgacggtttgccagtcgtagtcctataagctgtccttaaaggctgtcacccagccagtcgtattcaggagtcctgtgcaatgacgcgcacgcgtaaaatcgccgcttggagctgcgccagcttcgtgctgttaatcgccatcgtggtattggtcctggtgttctttgactggaaccgcatcaaaccgcccctcaatgccaaggtctccgaagagttgcatcgaccctttgccatcaatggcaacctggcggtggtgtgggcgcgtgagcccgatgaaggcggctggcgtgcctgggtgccgtggccccatgtgattgccgaagacctgaccctgggcaaccccgactggtcgaaaaacccgcagatggtcacgctcaaaaaggtggaactgcgcatttcacccctggcgctgctggtgcagcgcgtggtgatcccgcgcatcgacctcaccgagcccggcgcgcaattgcagcgcctggccgacggtcgcgccaactggaccttcacgttcgaccccaaggaccccaacgccgagccctccaactgggtggtggacatcggtgccatcggcttcgacaaaggccacgtgaccctcgacgaccagaccctcaagacgcaactggatgtgatcatcgatccgctgggcaaacccattcccttcggcgaaatcgtaggcgacgccgatgccaagaaggcgctggaaaaaggctccgcgccacaggattacgcgttcggcctcaaggtcaaaggccagtaccacggccagaaactcgacggcagcggcaagatcggcggcctgctggccttgcaggacgcggccaagccgttccctctgcaagcccaagtcaagattgccgacaccagcatcgccctggccggcaccctcacagacccactgaatctgggcgccctcgacctgcgcctgaaactcgccggctccagcctgggcaacctgtatccgctgaccggcgtgaccctgccggattcgccggcttattccaccgatggccacctgatcgccaagctgcacgagccaaccggcgcctcgttcagctatgaaaatttcaacggcaagatcggcaacagcgacatccacggcagcctcgcctacgtcgctagccaaccacggcccaaactcagtggcacgctggtgtccaaccaactgctgatgaccgacctcgcgcccctgatcggcgccgactccaacgcccagcaaaaagcccgtggcggtgacagcaagcagcccgcgaccaaggtgctgccggtggaggagttccgcaccgagcgctggcgcgtgatggatgccgatgtggaattcaccggcaaacgcatcgtgcacagtgccgatctgccgttcaccgacctctacacccacctggtgctcaatgacggcgaactgagcctcgaacccctgcgtttcggcgtggccggcggcaagctggatgcgcagattcgcctgaatggccgtaccacgccgatggaaggccgcgccaaactcaccgcgcgcaacttcaagctcaagcaactgttcccgactttcgaaccgatgaagaccagcttcggtgaactcaatggcgatgccgatatttccgggcgcggcaactcggtggcggcattgctgggcacctccaacggtgacctgaagatgctcatcaacgacggcgcgatcagccgtggcctgatggaaatcgccgggctcaacgtgggcaactacgtggtgggtcgcctgttcggcgataaggaagtgaagatcaactgtgcggcggcgaacttcggtatcaagaccggcctggcgaccactcgcctgtttgtgttcgataccgagaacgcgatcatctatatcgatggcacggcgaatatggccacggagcagcttgatctcaccatcaccccggaatcgaaaggcttccgcctgttctcgctgcgttcaccgctgtacgtcaacgggccgttcatcaagcccaatgccggggtgaaagccattccgctggcattgcgtggtgcaggcatggtggcgctgggggtgatcgccggaccggctgccgggttgctggcattggtcgcgccgagtggcggtgaaccgaatgagtgcgcgccgttgctgcagcagatgaaggaaggcaaggcgccgaaaaccgtgaaaggctaactgcaaatgtgggagggggcttgcccccgatggcggtagaccagtcgacatctcaattgactgatccaccgctatcgggggcaagccccctcccacatggggttacaggctttctagaatatccgccatgtcgtccgcatgctcttcttcctgcgccaggatctcttcgaacaggcggcgcgtggtcgggtctttatcaccgatgtactggatgatttcgcggtagctgtccacggcgatccgctcggcgaccaggtcttcgtagaccatctccttgaggtccttgccggccacgtattgcgcgtgggagttcttcgacagcaggtccgggttgaactccggctcgccgcccaactgcacgatgcgttcggcgagtttgtcggcgtgttcagcttcctgggtggcgtgttcgaggaactcttgcgcggcgacggcggccttgatgccgctggccatgaagtaatgacgcttgtagcgcaacacgcagaccagttcggtggccagcgacgcgttgagcaggcggatgatttcttcgcggtcggcgtcatagccctcggtcacggcaccgttttcgacgttctggcgggcgcggctgcgcagggtcgcaacgtcagtcaaatttgcttcggtcatctcaatctcctggggctaatccggttttgcgccacgctctgtcggcgtgatcgctccaagttgtgagtcctggagaaagcaaaaagttttattggatttaccgatagcgtcataagcccgacttgaggctgggctaggctggatggatcggattgagaggatgcccggttcatgccgcagtcgttggccacgcgctaccccctggtgttggtacccggcatgctcggcttcgtgcgtttgggctggttcccgtactggtacggcatcgtcccggcattgcgggcgggcggggcgcaggtatttcccgtgcaagtggcgccgctggactccagcgaggtgcgtggcgagcaactgctggtgcagatcgagcgcattcgccgcgaaaccggtgccgacaaggtcaacctgatcggccacagccaaggctcgctcaccgcgcggtatgcggcggccaagcgccccgagtgggtcgcctcggtgacctccgtggcaggccccaatcatggctcggagctggcggatcatatccacctgcattaccccgctgacggcgtgaagggccggatcatgagcgcgctgtttcacctggccgcctgggtgatgggcgtgctggaaaccggctatcgcggaccgcgcttcaagacggacttgcaggcgtcccatcactccctgaccagtgccggcgtggcgttgttcaaccagcaatacccgcagggattgccgcagacctggggcgggcagggcgccgaagaggtcaacggcgtgcgctattactcatggtccggcaccttgcagccgggcatcaccgaccgtggccgtaacctgttcgacggcacgaaccgcagttgccgtttgttcgcccgcagcttcgtacgggagaagggccagtgtgatggcatggtcgggcgctacagctcacacctggggttggtgatcggcgatgactacgcgctggatcacttcgatatcgtcaaccagtccctgggcctggtgggcaagggtgcggagccgatccggctgtttgtcgagcatgcacggcgcttgaaggcggccggtgtttaacgcactggggtggtccagcgctccgacaagatcaccccgcccaaggtcagcaggccgcccaccaggtgatacagcgccagttcttccttcagcaccacggcggcgatcagcgcggtgatcaacggcagcaggttgaaaaacaacgtggtgcggctcggccccagggtcttcaccgaatgcatccaggccagcggtgccagcatcgacgccagcaggcacgcatacaacaccagcggaatattggcccagcccaggccggccttcgccgagaacaggaacagcggaaacagcaccaccaccgccaccagcacctgcagatacagcagcaccagcggcggcaggcgcagttgccatttcttcagcagggtgctgtagaccgcataggccagggtggcgaccagcatcatgccgtcacccaggttgaccccgtgttgcagcagtgcgccgaggctgccggcggacacaaccaccaccacgccggcgaatgacagcaccgcaccggtcagcgcgccgtaggtcaggcgctggccgaggctgatgatggccgccgccagcgccatcaatggcatcagtgacaggatgatgcccatgttggtcgccgtggtgagcgacgcggcgtagtaggccaggctctggtacaccgccatgcccagcacgccgaggatgaacactttgcccaggttcgggcggatctgcgcccagtgggcaatcaccggcttgagcatgaatggcgtaaacagcagtgccgccagcagccagcgatagaagccaatctccgccgggaagatcgagcccacggccagtttgttgacgacggtgttgccggcccagataaaaatggccagcaagggataagcgtattgcatcgaaaggaacccggtgtgtagatgaggcaggattatccattgtctggatcgaagcctatactgcgatccagacaacccactgctgtatccagacaacatggccaagcacaacgtacgcctccaggatttcccccaactgccgagcccggtgtattttcgctattcggatttcgcccccgacaccgagtgcacgccgcaccagcatttctggggttcgctggattactccgccagtggcgtgatgcgcatggaagtggccggcagccgcttcatgtctccgccgcagtacgccgtgtgggtgccgccgcataccgaacacagctcctacaatgccgaggcaattgtctaccactcggtggggctggccccggaactctgtgagcaattgccccggcagccgtgcaccctggccatcagcgatatcctcaaggccatcctcagtgacttcgcccagcgcgatgtgaacatgccgcagaccgagtcggacatccgcctggcccaggtgctggtggaccaactcaagcaggcgccgatccacgagtgcttcctgccctacgcccgtcaccccgggctgctcggcgtgctggaaggcatgcaggccgaccctggcgataaccggcccctggcgcactgggccgagcaggtgcacgtgagcgagcgcaccctggcgcgtcagttcgtgcgggaactgggcatgagcttcggtgaatggcgccaacgcctgcgttacctggccgccatcgaggccctcgacagcgagcgcagcgtgcaacatgtggcgtttgacctgggctacagcaccgcctcggcgtttatcgccatgttccagcgccaggcgggatgtaccccggagcagtaccggcgcgcccatattcgtagtcggtgaagatgtaacaggctttgactacactgctggataggccgtgcccttcggtgcggtaacagggagaaaactccatgaagatgctgcgaattccgctgttgatgatgggcttgctgctgtgttcccaaggctttgccgccaccgcccagcaaaacaaaatgaccacctgcaacgccgaagccaccaccaagacgctcaagggcgacgagcgcaaggcgttcatgaagacctgcctgtcagccccggcggcgaatgacgccaagaccctgacaccgcagcagcagaagatgaaggattgcaatgcgtcggcgaagaccaaggcgctggccggggatgcgcgtaaaacctttatgagcacctgcctcaaaggctgatcactctttcgcgagcgccgcagatcaacggtgggagccgggcttgcccgcgatacaggcgcctgggtctgtctggtacaccgcggcgaggccatcgcgggcaagcccggctcccacacttgatcgcattcacaaccgacccactcgcttgattccctcaaggctggcagactgcccatcctttaacgccgttcgttttgaggctgtatgccaacgttttctcagcgtcacgtgctattgctggccagctacatcatcatttttggcgggttgctgctggtgctgccgctcaaactgctgcccagcctgctggccggcctgttggtctatgaactggtcaacatgctcaccccccaactgcaacggctgatcgaaggccggcgcgcgcgctggctggcggtagcgttgctcggcacgttgatcgtcagcgtcctggcgctgatctttgccggcgccatcagcttcctgctccacgaagcggaaaaccccggggcgtccctcgacaaattcatgggcgtggtcgaccgcgcacgcggccaactgccgccgttcctcgacgcctacctgcccgccagcgccgccgagtttcgcgtggccatcggtgactggctgagcaagcatttgagcgaactgcagcttgtgggtaaggatgccgcccacatgttcgtcaccttgctgatcggcatggtgctcggcgcgatcatcgccctgcagcgcgtgcccgacctgaccaaacgcaaacccctggccgccgcgctgttcgaccgcctgcacttgctggtccaggcgtttcgcaacattgtcttcgcccagatcaagatcgccgcgctcaacaccgccttcaccgccgtgttcctcgccgtggtgctgccgctgtgtggtatccacctgccgctgaccaagaccctgatcgtgttgaccttcctgcttggcctgctgccggtgatcggcaacctgatgtccaacaccttgatcaccattgtcgcgctgtcgctgtcgatctgggtggcggtggcggcgttgggttacctgattgtgatccacaaggtcgagtacttcctcaacgcgcggatcgtgggcgggcagatcagtgccaagtcgtgggagttgctcttggcgatgctggtgtttgaggccgcgtttggcttgcccggcgtggtggcagggccgatttactacgcgtacttgaagagtgagctgaagctcgggggtatggtttaagccttgtattggccagtctggcctcatcgggggcaagccccctcccacattttgatctgtgaacacattcaaaggtgggagggggcttgcccccgatgggcgcgccgcggtgtttcagataaaactcagctgccgtagcgcttgctggcctcaatcgccaagccgctgccgatactgccaaagatgttcccttccacgtgccgcgcatttggcagcatcgccgagatgctgtggcgcagtgccggaatcccgctggaaccgccggtaaagaacaccgtgtccacctgggccacgctcaccgaggcatcgttgagcaactgcgtgacgctgttgcgtacgcgctccagcaggccatcgatggcggattcgaacaaggcgcggctcaactccacgctcaagccgggctcaacccggtccagcagcacatggcggctgtcgtcgtgggtcagttggatcttggtttcttctacttccatcgccagccagtgcccggcgcgctgttcgatcagtttgaacaggcggtcgatgccgccggtgtcttcgatgtcgtagcgcatgctgcccaacgccagctgggacttttgcgagtacaccgagttgatggtgtgccaggtggccaggttcatgtggtggctggtgggcatgtaggccccgctcttcatgcggctgccgtagccgaacaacggcatcatgccgttcagcgagagctgtttgtcgaagtcggtgccgccgatatgcacgccgccggtggcgaggatatcgctctggcggttgtcgttgtgacggcggtccggcgacaggcgcaccagcgagaagtcggacgtaccgccgccgatgtcgacgatcagcaccaattcttctttctcgatggtggactcgtagtcgaacgccgccgcaatcggctcgtactggaacgagatgtccttgaaacctatcttgcgcgccacgtcgaccagggtgttctcggcttcctggtcggccatcgggtcgtcatcgacgaagaacaccgggcggcccagtaccacttcttcgaactcacgcccggcgttggcttcggcgcggctcttgagttggccgatgaacagcgccagcaggtcggtgaacggcatcgcggtgccgagcacgctggtgtcgtgcttgatcagcttggaacccagcaggctcttgagcgagcgcatcagccggccttcgtagttttccaggtattcgtgcagggccaggcgaccgtacaccgggcggcgctcctcgaagttgaagaacaccaccgacggcaacgtgatcttgtcgtcctccagcgcgatgagcgtctcctcgccggggcggatccagccgacggtggagttggacgtgccaaagtcgatgccgcaggcacgggctggggatgggtttttcatgtctatcgggttccggttgaaaaacggccgcgcagtgtatgccagtcgaaggcggatgcgtaggccgactatccgctaaatcgcgcttgaaagttgggtatttgcccccacatctgttgcatacggcaagtgccgataacactttgacgcacccccaggccacatcactcgacaagtgcaatgcagcgcacgttgtgcccagggctgtgcgatctcgattaaggatggtgaaccgccgatggatttcaaagactattacaagatactgggcgtagagccgaccgccgacgacaaggaaatcaaggcggcctatcgcaagctcgcgcgcaaatatcaccccgacgtgagcaaggaaaaagacgccgaagccaagttcaaggacgcgtccgaagcctatgaggcgctcaagagtgccgacaagcgcgccgaatacgacgagctgcgcaaatacggccagcatggccaaccgttccagggcccgccgggctggcagagccgtggcggctttggcggcggtggtggcggtggtggcggtgaggacttctcggacttcttcagctcgatcttcggctcccgtggcgacgcttttggtggcggccagcgccggccagccgggcgcaaaggccaggacgtggagatgcagctgtcggtgttccttgaagagacgctgtccaccgagtccaagcaggtcaccttccaggtgccgcagtacgacgcgtcgggccgtcacgtgagcaacaccaccaagagcctgaacgtgaagatccccgccggcgttaccgacggcgaacgcattcgcctcaaggcccagggcgcgccgggcattggcggtggtgcgaatggcgatctgtacctgatcatcaagttcgcgccgcatccaaaattcgaagtggatggcgaaaacctgatcatcaacctgcccctggcaccgtgggagttggcgttgggtgctgaagtacaggtgccgacgctgaccggcaagatcaacctcaaggtgcctgccggcagccagaacggccaacgcatgcgcgccaagggccatggcctgctgaacaaggccgggcagcgcggcttcctgttcgtgcagctcaaggcggtaatgcctaaaggcagcattgatgaggtcaaggctctgtggcaggagctggcgcaaaaggcggcgttcaatccccgcgaaaacttctgagggcgtgaacgcctgggcgcccgttactgcgggcgggaggcgccgggttgctggtgatcgccgccgtgcggtgtcagctcggccacctcccggcgtgacagctccagcagcttgaggttacgttcggtggcctgctcgatttccagccggttcaaggcctcgaggtaggcgtcatcaaagtcttggtgtgcatcttccagggcgttctgccgtgcgtcggcattgcgcttgagggtggcgaactcgtcggcataccgctgcttgaggtagtccacccagtagtcccggctgatcaggtcctcgtaaaacacctcactgcgttccgcgtcgagaatgttgcggcgcgcgtcggccagttcagtgccagtgattggccggctgaaccgcatgtggcggggttgcccaggcagctccagctggtccggccatcccctggccagtccgatgcggtacgacaagcgcacttccgccacgtccgagtgtgggagcagcgtcctgtcggcctcgacttcggctctgcccagccggaacaactgccgggacaggttcaacagggccgcacctctcagatccagccgcgccgtatcgacgttgagcaacgcgttgtgctcgtagaccctgacttccagcccgctgaaggtcaggatgcggccatcgacgcaggtgccgtgcgtatgggacatggcgaacagcgcctggcgcagttcggtgttatcggcggccgcttccagcacgttgcgtacccgctgcgacaggtcggcgcgagccgcgccgaactccgtagtgtcctgcaaccgttcgagcaggtgaaaaaacgcctggtgatccggttcggcctgcagttgtgtccagatctcccgcagcctgccttgctcaggaaggggcaggtcgtctatccaaggcaccggttgttcaggtagtgcgggttgcgccgggagctcttcgtcgggttgttcagggaagatttcatcgggctctggtgatgacgggagcccatcgtccagcattgtctggatgtcccggcgtgacaggcccagcgccgagtcacgccccgtgcggtccagatactcgataagcgccgtcaggctgtcgtgcgacaaggggttgtcggagatatctgtaccctccatcaaggcatcgtggctgccatccagtgcttcggtcgggattgcactgatgtcattggcgctcaggttgagcgtgcgcagatgaccggcttccaatgtgccggccggccaatcggtgaggcggttaccgctcaggttcaacacctcgaggggcgagccaggctcgagactgaaaaactccatcaggttgtcgctcatgtccagacgttgcaggtttggccagtcatccaggccgatggccaactcatcgtcgaatcggttggatgacagatccagctccctcaactcaggtaattctgcgagtgccctgggcaagccctgcaactcgttgccggtcaggcgcaatgtgcgcaggttggaaaagcctgcgaggaaaccgttggagccttgttcggcgaacaggaggccgctcaggtccaggtgatgcacatgggaaaagtccgccgttaccaccggcaggttgtccagttgcaagccgttgaaactcagggtctggcccgccgggtccgacgccagcccctggcgccagcacgtgacgatgcgttgcgcggcctggttgcggcgactggccacggaccagtcggtggctggcgagcctcgcgtgtacagccagccattgagctggcgtatcagggtgtgcagggcctcattccagacgtcgatcagagcgtgcaagtgcgtgtcactggcgccgcctgcgcgcaggcgtgtcagccattgctgtaacgtctgctcatccatgccgtgctgcaaacgttgcaggcgttgcggcaggggcaggccggtgtcggcggtgggcaggtcgagcaggtggcgggccaatgaggctccgctttcggcctcggggaatacgttggtgggtggttcctcataggcaaaacgctccagggctccggcgggcaggccccgggcggtttcaacccgctgtcgggccacagccagcgcgccttcggaaacctggctcaacggcgtaccgaccacgttggtactgagcagcagctcgtctctggtcaggattgcctcgggcaacacggtgatgcgggtattgcgcaggttcagcgaggtcagttgcgccaagtcctcgagaccggtcggcacttgctgcaggttcgtttctcgcaggttcagcgtcctgagtcgtggcatgtgatcgagctcaaggcgcgtgaggggattgccttgcagcgagagatgttccagtgcgacgaagtcctggagctcggagggggcggcggccagctcgcagtagttcagttcgacagtgcgtgcctgggtgaatgcccggacgaaacgactgacctgctccatgggcacacgcaggttcatcaggcgcaaggctagggtgtgggggaagctgttggccggcaattcgggcaggcttgaggggctgaaaccgcgtagatccacttccagaaatgagcttggccgcgcgcgcagtgggtcagccgccgcgtagaggttgagcagcccgcgactccattgcacccgcaagtaaccgcccatccatcgttggtttgcgtgttccaccgcgtggggaggacgcagccactcgttcagccgccggtcgatttcactgtactgttcgctcagcgcctcaatcgcgtcaaagcgggcgcggtgaccgacccagcgttcggcgaagctgttgatcaacacctgcgagtcccgagcgggctccgtgaggcgtgccagttccccgacacagtaaatccgcaccatttcctctaggtcgatcaagtgatcgggttggttgttcagccgggtatagagcgctctgaagctgtcgcgcgacattctcgaccagtccagcgagaggccggacagcaggcgctggtgaccttccagcaattcggccggaatactctggataccggtgccgcgcaggttcaggcgctcgagctggggcaggtcctgcacgccaaccggccaatcggtcacctgagagccgactatttccaactggcgtagccgcgtcaggcggctgacatccagactgggttggtgagtcggcgcaaacacgttgttgttggcaatgctcagctcttccaactggctgagcgtgcccagggtgttgatgttttcggccgagagcggtgaaaagagctgcaatctcgtcagtcttggccagtgtgtcaatgtctcgagctggttgatgctccgcgggccggtgacgaagatatgcaggctttccacgctggggaacaagccaggcaattgctccagcggttggccgtgggtgaccaacacgcgcacatgggaaaaatccgccgtcaacggtggcaacggggcgtcggtggtgagttcaagtctagcggctgtctgcacgtcactggcgaggggcgcattgcgccaactggccctgaggttttcggctgtggtattgcgcagcatggcttccagtgaggtgggcggctgcgttgcaacccactgcgccagtgtgttttccagggttccccattcacgcccgcgtgcctgcaacagcccgtagatctgcgcgtcggtttgcccggcgcggcgttgctggaggataaagccgttggcctgctcgtcgctcaggtcggggtacaggtcttgcacgcgcgtgaccagcgacgggtccatgccggcgccacggccactggcgtagtaaccggcctgattcacgcggatgcgcgcaggcggcttgaaccgcgtcgcctcaccacggggctggcccagccactgcggcgccaggtgacggtgctcgaccgcactgcgaatgatgctgcgctgcaactcggcctgctggcccacatggggaacacccaacgcctggcgcgcttcgtcgggcagggcatgcagcaccgacgcgtaaaagttgtcgccatacctgggcaggctgttgagggcctcgccgcgctcgtcgaacgcctggtagaccgggcctttcttgaccaggaatttgcgctgcatcgcgtgctggttgccgatggcctcgatcagccggccacctacgtgttcatcgcggatttccaggcgcaccgcgtccgaccagcccggcagtttctgcaatgcgtgcagggccaggcgcttgctgtcggtggtcgcgatgtgatccgtgtgcagcccggcataggcgcgggcctggcgcccttgtcgtgcataccagcggccttcttcgagcaaggccagcggcactttgccggtgctctccaggcgctcgagggcttcggcactggcgtggaccaggatgtcttgcgctgctggcttgctcagccccggacaggctttttgcaattgtgtgatgcgcaggtcagtgggtttgggcccttcatagagactttcgaaaatcgctgatcgacgggtctgcgcaaagtcggcgatctgttttctgaactccaccggccttgcctcgcgcacccgtgccgcctcgccaccgagcaggccggtgatctcgtcctcgtccagcgccgccaggatacgccccggcagcccgctgcccagtacatccgcgcggctcatacggatgggcgccctggcgcgcacgccggcatacaagcgctcggcgccgtactgaatggatttcccccgcaggctcggaccgtcaaagacctccagcacccgacccgccggccagcggggcaactcagtgaccagcggcaggatgtacagataacgctcgtccaccgccgtgccggtctgcacctggctgatcacctcttcgacgcccctgtcggcttcaaacaggcgcatggcatccgtcaactcgggcggcggtggctggttgtccaggtggaccttgcgcagggtgttatcgctgacgccgctgacttcggcgatcttcaacaattgctcgtcggaatactgttcggtcgcgttgccgaaccggcgtagcagcgtgagccggtcccaggccagtgggcgttccagggtgtggcgccaggccccttgcccgttgtgccgcagcagcggctgataggcatccggatcactggggtgctgaatgcgccactcgccgggcggtgtaccttggcttatttcgtagtgcttaccgtcctggcggatataggttttgccgttgaccgcataacgtccctggggatcggggctggcctcgggcgccagggcaacgtcgcttgcataggcgttcaggtcgggcttccacaggcgggtttctccgttgggcaaggtgactgactgcaacccctcgatcaccggttcagccggtaccgccgtcaatttggccaggcctcttcctacccccacttgagcagcaagcaacaccaggttctccgccacatcaatcaggtgagccttggccgctttgcgatcaccttcggaccactccttcacaccttcgaaggtttcgtacaggagctggccggccatcacggcgatcatgacttcacccagcaccggtacgaatatcgacaccccggtcaacagcagcatgccgatattgagcagcgccgccaatttgcgcgaacgcacggtggcatccacttgcgcggtcggcacggcgtggctgcgggcgtcggcgtagactttggcgcggtgttgctcgtagaggtaggtccacaggtcgaagttatcgatccagaagataccgctgtgcacgggcgcgataacgacagggttcaggtacggatcgtcgttggccacctgctggatcgggttgggcggtggcagggtgttgacccggctgaacagggaaaacgggtcgagcccctggcgtatctggtccagcaagggcgcatacggggccaggtcctgggcaaccgtggtttccgaggtgtcctgggtgaattggctgaagtagtccgcgcggtcggcgtaatcgacgaactggctgaaaaaacgctggtaggcgctggggctgccggcggtggccgggggcgtgtcgcgggcggtgaagcgctctttgaacagtggcttgagctggcgcaaggtgtagcgtttgaggggcgattgcggatcgtcggggatgtacagcagcaactcgctcgcgttgtggagctctccgctgaccagaaataccaccacgcccgtgagacggtgcttcatcaaactcaagtcgcgaaaccagatgcgttggccgttcagcatcggttcggtttcgccgccgaccaccgcgagcaccatgcggtagtccgcgtcggtgatgtcttttttcagcagggcctgttcagcggcaacgcgcagggaggccttgtgggcggtgatgaatttgtcacgcactacggcctgcgtgaccgcgtctttgggctccaggtaatccttgaggtaggcctggtacttcgcgccgatgtccagtgagcggcacagcccagtgaattgcgccacggtcagtgatgtagacactgcgtcgaattcatctccggtcttgaccacgaaccccgacgaagggtgaaaggcgttggcctcacattcagcctcttcgaagttgtgcagggcggcttgcagcagaggcagcttcagggcttcgaaccaaccggccgtgatcgagaaaacgccgacggtgatggattttctgagcctcagaaaggttttatcgacatccagctgcaccttgaactgatcgttcaacgcctgggtcaacaggggccgggcaaaggtgtcgatgtcttgcatcgcggacatggccttgtccagtttgccttgcgcagtgaagcttgcggtgatggcgtcttgcagcgatttgcgttgtgctggcgaggcgtgctggtaccaatcgggcgtcgtcgcgggcgtcgttttcagggcttcacgttgctgcgcagtggcctgggtcagccaatcgggaatggcgttttcgagaaagggggtgtgcaggctttttgaagcgggtgaagccgtcatgctgtctctccttgggtagtggagcagacagcagatcacttcggcaggcgcggctagcggtagatagagaacaccaccgaaggctggcgccagggcgggcaaccctggcgccgggtggtcaggtgatcgggttggcgcgcagctccgtgcgggtcagtgtttcaatcaggttggcttcctggatggcaagctgggcctgcaagtccctggcctgctgcgcgtagtcggcgtcgcccagcgagccttcgacatgctggtcatgcagcgctgccaggcgctcatggaagggctggccctgcgcctcgaattgctcgcggtacttctgggtcaagtactcctgccagaattccctggagatcagcgcctggagttcggcgggcgaattgttcagcttgaggatgttgtcgcaggtggccttcaacacctcttcactgacccggcccaggccgatgaactgcgccgattgcggttgtcccggcaaatcgagtctggttttgtctttgagcccgaatcgataggcgagcctgatttcaacttcctcgagcatggcgatctgctcggctttctcctgcgccgacaaccttgggttgttgttgatcgcctcggtgcgcctggcgatatcgttgagcgcggttttttccacctcgtcgagacggaacaagcccctggacaatttgatcagtgcggcgccttgattcacatcggcagccagggtcttggcgttgtgcaccatggccatgacttccacgttgctgaacgacagcccggcgcgatcacagcaggtcgcgcggcctgcccattcgaacatctgctcgcgcaacgcggcggattcttcggagttttgtgtgatggtgtcgatcaccctccacacccgttgttgcaggtctgcatggccgccgcgaggttcactcaggccttcgagcatagcgaagaaaccgtcactgccaggctgttcgcgcaattgccgccactgggtttgccgggcggcgacctggtcctcggccaggtcttgggtccagcgttgagtctgcgtcggctcgatcatcacatggtcccgaatgcgcggcggcagaggtgtgcgcgccggggcgagtgccgagatgaccagttggttcgggtggtcggccgaggccaggcctgcctgttcaagcctggccctgtagtcccttagttgctggcgcgtctgctcggtcaacgggttgttgttgagttcgattttgtgagtgagctgcacggactgcgccagttgcgcgtcgggtgggttgatgagcgagccgggcagttgggtgatgcggttatccctcagcgcgaccgtgtccagcaagggttgcgcgcctaaccctgtggggaatgtctcaagcccgcagttttgcaggcccagcgtacgcatatcggtgaacacgctgaagtccggtgtaaggcccagtgggttgtttcccagcagcagcgccctgagcgtggttcgccgggccagcacttgcgcggtttcagcggtcaatcggatctggttgttctgcaggaacaggcgggtcaacccgttcatctcattgagcgccatcggcaactcgcgcaactggttgtttgacaggtccagccagcgcacgccgctatggcgtagcaggaactgctcggggcaggtgctcaggtgcatgttgctcagtttgagtgagcccacgtggctgaaatcggcgtccagttcgggcaggctcggcaggttgaggccgctgaggtcgagttccaggccaatggctgtcccatcgttggcgtgttgtgtcggcgtttccttgcgccagcacttcaggaccctctccctggcctggtagcggtcatccaggtcgatgacattcagcaagcgctgttgcgtgcgcacgtagcctccgccggtgcggctgttggcattgccgcccgccgccgcccaggtattgagttgtgtgttgagcgtctcgaactcttgctccaagcgcaagagttcggtgttggcgccgtcacccagggcccagatgaattgccgggattccagaatactgcgcctcgggtacagcgcccgggtgcgttcaagctgcgggttttgcatatcgaacacatcggcggttccgatcaggtccggacgctgttcgttcaggcgcctccaataggcgtcgaagcgctgggcgtattcttgcgggaatgggttgcctttgaggcgggtgactccgttgatcctcgcgatggtttccagttgctgcggttgtggggcgagattggcctcgggtatttcgcgcaggcggttgttgcgcaggtcgagcagttgcaggctggttttatcctgcaggccggtcggccactgatcgatcccggtataggacaggtccagtgttttcaaacggttcaaggcgctgacgtctggagtgatgcccaggcggttgccgctgagttccagggtttccaactggtgcaggcggctcagttgggcggcgctctgtggggtcagcatgattttgttcgctttcaggctcaactgggccagctggggcattgcgtcgagtccatcgggtaacgctgcgagttcgcagccatccaggctcagggtcttgacctggcggaagttgttcagaaacgtctgggcattgcccgaccacattttggtgttcagctccagtttctcgacgtggctgaagtctgccgtcagcgcgggcaggtccactggcataccgctgatgattttcagcgtattgcccgactcacgacgccagcagcgcttgatgtcctcggcgatcacccgggcgtagccgccagcccggtcgtacgcagtcaccaccaggcgcggtggattggctttgacccaagcctccagatcagtttcgagcttgctgtactcggcttcccgcagcctcagcctggtacgcacgtcgctgcccagtgattcgataaaggcgtcgatttgcgcatcgctgaaagaggggtagagcttgcgcacccgctgcgctgtgctgcgaaatggcgccaccagtttttcgtaaccgcgaccgccgcccagtaaacgcatggtggtgtcgtaggccggcttgcgcaccgggtgttcgagcaacacgccgcgcagtgcctcgcgtggcaagggggcggcctggatggcagcttgcaactgtcgggcgtcggccagccgaaggtcctggcgttcacccgatgacagcgcgtccagaatggcctggtacagatccgtagggcgaggccctttgaattggccgttttctagctgcaccaggattttgcttgtcgtggtgtccagctcgccaatggcatcgagcagcggaccttgggcggagtgctggcgcagttccatgcgtgctccgcgacgccagccaggcagggtctccagggtgcgcagggccaggcgctggctgtcgaggtcgtacggggtgttcaggtgcaggttttcataggcgcgggctacccgggtttcttgttcgacccattgcgccgtttcggcgagcgtgtctggcaggcgcccagtgcgacgcaaggcgagcaggtcttcggcgctgagttgggtgagcaaatatgctgcgatcggtgtcggcagtttggggtaggtgtctttcaagcgttgcacgtccaggtcggtgttggccgtcagcttttgataacgctcctccacctgtgccgccttgaaccgttcgacaaaatcacccagctcccggcgcaatttgccggcccgcattgcaagcgtgtcctggggcgagccggggatgtcgaccagttccgggtcggtgccttgtagcgtgttcagcacttcacgcagtccttcgccgcgtgccagttgttgcgcggtgaggagtaccgtgcgcctgcgcgatgacggtgggtagggttcgtcgtcccatacgatgcgcccctcatggtcgattacccgcagcgtcggggagctggacagcaggccgcgccgcttcatcaagtccagttgtgtgcccaggtccgcctgggggtagacctgagggtcggcgcttttgagctgttcgatgaaggtggtgacctgctgatgaagcctgaaacgctgcaacgagtcggccagcagcaggggcacgttttcggcgttggcatgggcttcacgcaaggcgttggcgctcaccccgctggcttcttgggccttgaacaattgttcgtcatcgagggcctcggcaggcaggcccaggcgccgtagcaaggtggtgtcatcccaggccagtggggtttcgccctcgtggtgccaggcgccttcgccattgtgtgtcagcttcggtgcataggcgtcggtacgggtcgggtgctggatgcggtattcggtgccttccgggtcctgggccacgcgataggtccggccttccagcggcagaatcctctgcccgtcctgggtgtacaagccatgcgcatcgggccgggcatccgccgccagtttgacgggcgatgcataaggctccaggtcgggtttccacaaacgggtcttgccgtcggccgaggtcaccggttgcaattgctcgaccaccggctcggccggcaccgcagtcagcttgccgaggcccttgcctgcaccggccagcacggccagaaacaccaggttctccgccacgtcgatgaggtgggccttggccgccttgcgatcaccctcagcccattcctccacaccctcgaaggtttcatacatcaactggccggccatcaccgccatcatgacttcgcccagccccggcacgaatatcgacacgccggtcaacagcagcatgccgatattgagcagcgccgccagtttgcgcgagcgcacggcggcgtcgacatccgccgtgggcacggcgtgactgcgggcgtcggcatagactttggcgcggtgctgttcgtagaggtagtcccacaggtcaaagtcgtcccgccagaacaggccgctgtgggctggcggcgtgataacagggtgcaggtacgggtcttcgttggggacttgcttgggtggcggtgacgctggcaaatcgttgacccggctgaagatggaaaacgggtccagcccctggcggatctgattgagcagcggtgcaaagggggccaggtcctgggacaacgtggtgtccgaggtgtcttgggtgaactggctgaagtaatccgcgcggtcggcgtaattgacgaactggctgaaaaagcgctggtaggcggtggggttgccgtcttcggccgggggcgtgtcgcgggcggtgaagcgttgtttgaacaggggtttgagctggcccagggtatagcgcttgaggggcgattgcgggtcgttggggatgtacagcagcaattggctggtgtcgtgaagctggccgctgagcaggaagaccaccacgccggtcaggcgatgcttggccaggctcaggtcacggaaccagacgcgttggccgttcagcgtcgggcgggtttcgccggcgatcaccgaaagcaccatgcggtagtccgcgtcgttgatgtcttttttcagcagggcctgttcggcggcggtgcgcagggcagccctgtgggcgacgacgaagtgtttgcgcagcaccgtcgctgcgagtgcgtccttgggctccaggaagtccttgaggtaggcctggtactttgcgccgatatccagcgagcgacacaacccggtgaattgcgccaccgtcagcggggtggataccgcgtcaaagtcatccccgttcttgattacgaaccccgacgttgggtgaaaggcgtcggcttcacattcgtcctcttcgaagttgtgcagggccgcttgcagcagcggcagtttcaatgcctcgaaccagccggcggtgatggacgcgatgctgacggtgatgggtttcctgagcctgaggaaggtcttgttcacatccaactgaaccttgaaccgatcgttcagcgccttgaccagcaggggcctggcaaaggtgtcgatgtcttgcagcgtggacatcgccttgcccagcttgccttgcgcggtgaagctggcgacgacgctgtcttccagcgtcttgcgttgcgccgccgaggcctgttgataccaggcgggcagcgcggcatccgagtgtttgagtgcgctgcggtatgacgaaggcacgtctgccagccaggccggtatggcgtctttgaggaagtcatgatggcggctgtcagtgacggatggagactcaggcatggtgtcgctcctgcaatgaatgagggagtcgacagcacatcatgcgcccaggctcgggcagcggtagataggtagggccgacggccggcaggcgcgacttaggattgcgcgattgtcagatcacacggtagtcacctcatgtccgagccaacctccccacctgcacccattgaacaaggccagcattacgctctgatcaaacaggcgattgcgccgtgcctgagccaggcgtcgccctcgcgtcgcctggcgctcaagcaaaccccggcacagattcccgattggtatgccgccgcctctcaatcgcgcaaagaccaactcaaggcgttgctggacgcacgttgcacgtcgctcaacgcgttggaaaagtccctggcgaagctgcagtcggtgacagccttcgcccagccgctgctggaagcggcgctcagacaggccggtttcgaactggacgtcaatcaaacctggttgcgcctctactatccggtcgaagacgcctttggcgtggcgaccggcgggttcaggaccaagacattctcgttgttgcaggcggccttgaacaacttcgaggcgcgggaagcccgggccgggtttttcaatgcgtcttccgggttcatcaccacgcccgatgcccggggacaattcgagcggcatgccacgacgctgaagatcgagacgtttgcccagctgtgccgtggcctggacctgggcgcgaagtaccaggcccatctcaagtctttcctgcaaccacaggatgcggtcgccgaaggcgtgctgcgcgagcgttacttgaagcaccagagggcggctttcgaagcggcagcctgcctggccctgctcaagggcgatatcgatgacagcgaccatgccctgttgatgcgcgtgctggccggcgagcggcagatcatgctgggcgacaagcaggtgtggtaccgcgtgccctgcctgatgaacctgcacctgcaggattgcctggtgatcgacccttgcgtcaaataccgctactccacatgggtgatcgtttatatcccggacgaccccgaccacccgatcaagcgctacgcctcctatgacgccttcagcaacgccatgaccgaccggctcaaggctgggccggggagggctgctgatcgctctcaagtcgcaccggccacggactaccagcgcttcatcagccagttcgttgcctaccagcaccggccctactactttcgcaggctcaccgagctggtgctggatgcgccgccgcagcccttcgccttgcaatggatacgctcggagtggggccagtacatcaccgagctcttcagcccaccggccatcacagggattgcctcgatcttcggcgattcccagccccaggggcgcgtaccgatcagcgcacctgaattcgatgtcaatgcggtttcgatcaaagggctctgggaagaagtggacctgtggccctatcgatacgaaaacctgcgtacccggctgtacgccgatgcacgcgcccaggccgtgagcaccgcggatgccgacgaagccggacggtctcggcgcctggagcactatctgaatatcggtttgtttggcgtgaacctgctgggcatggtgatcccaccgctgggcgtggcgatgtcattggtgacggccgggcagttgttgtacgaagtgctggacggtgctatcgattgggcgcagggcgaccgtgaagccggctgggcgcatatcaccgatgtcattgaaaacctggcgctgctggcggtcggtgcgaccgtcagccatctcaccctttcgccctttatcgaacagctcaaagccgtgccattgcctggcggcaaggtgcggctgtggaaaccggacctgtcggcctatgaacatacgttgcggttgccacaaggctcggtcgcggatgggcgcgggctccatcgggtcggcggcaaacaggtgctggaactggaaggcaagcgctatgccgtgcaacaggatgccgagaccgagggctactacatggagcatccaacgcgcagcgacgtctacaagccccggctgaccgccaatggcagtggggcctggaatcatgaactggaacagccgttgcgctggcgcggggcaaccctgatgcggcgcctggggccggtgatggacggcttcagcgacgccgagctggagcagatccgtcgggtcagcggggttgaggaagacaggctgcgtcgtgtgcatgccgagggcgagcccgtgccggcgatcctgctggacacggtgcgccagttccgggcctatcacgatgcggtggcggtggccgaggggatcggccagggcaagctctccagtgccctgtgcagcttcccggccttactggtcactgagttgagcggatggccggagcatctggcgctggaagcctattcggacattgaaccgcgcagcgtgtcggccaagtacggtaattcaaaagccattgcgcgggacacgctgcgtctcagccgcatggcgttgatgaggggggagttgcctgcggcggtcatcggctttttgagcgaagcacaaacccacgcgttactgcccggctacaccccaaggaccccggaactacgcattggcgccttgcgcaaacgcctgaaggactttgcggtgaaccagcgcgcccggttgatgcgcagcctatacgccgagcagcagcccactgcgcagcccgccacccaattgattacacgccagtttccacgcgtgccggcgctgatggccgaggagctattggtcggcgctacgccgcaggaattgcgcaccctcaacactgaccagcgcgtgccgttgcgcattgccgaggccgcacgccaggcgcagcagcaaatgcgcctggcccacgcctatgaagggctatacctggaagcgctggcggacaaggataccgaggtcctggcgctcaacacgcttcagtccctgccggggtggaaggacgacctgcgcctggaggtgcgcgacgccgagctggaaggggagttgcgggccagcttcggcgccgaagacgcctctgagcgcaaggtgctggtgcgggtcggcgagggccgctatcaggcgcgcaatattcgtgatgaaaccctgcacgaaaccgaagacctgtatgcggccctgcaacatgccctgaccgatgcgcaccgtcgggccatcggcttgccgagcatcaaacaaggtccacaactgaaggcaaaaatcgttgaaggcgcgctgccacgggatcaactgcggccattgctcaagatgcagcaacgccgctaccgctttgccgaccgcccctcgatgcgcctgcccggcggacggctggggtatcgatggagcaatcatggccaggacactgcctgggggcgcatcgtcgaggagcgcgtgcgcagcctctaccccacgttgaccagcgaacaggtgagcgcgtttgtcgatgggttgggcgtggagccgcacgcgaagctcaaggccctggagctggaatacaaaaccttcgacaacgcgttgcagaactggctgcgcgagcacgtccggcaagtgtccgcagaggctcgccgctctggcgcgttcctgcaccagcggcgcgcgcgcctgaggatcgtcagggccttgcgcgaagcatggcgtcgcaccggaagcgaggacctggatatcagcgggtattcccatggccaggtcattgacctgtctggagaggacctgttcgaccaattggaagaactgcccctgctgaccgtcaacttcgatcacgtctcggcccttgaactctcgggcgccggcatcgagaccgatcccaccccgttcctgcgtcatttcaagcgcctgcgtcgtctcggcctggagaacaacgagctgacggtgctgcctgaggcaatcgggcagatgttgcgtttgactgcgttggacttgtccgaaaaccagatcgtcctggacaccgacgctgtcaatcgcctgaaaggtctgacgcaactgaactacctgggactggagagtaacccgcttcacctggcccccgacatcggccgcatgccggacttgagcatgctgctgctcggcgataccgggctcggcacttggccgcctggcctgttcgatcagcctcgtgcacgttcttttgtactggacctgagtgccaatcggctggacagcgtgccgcaggtcgaaccggggtcaagccaggcgaataccgtggcgcgtacgcggatcaacgcggaaccacggtacatctccgcacagaacctggacgtgatcaggggctatcggcaatcggtagggctggagcctgatcgaccctatccgcccaggggtgtgcttgacagcattcattggcgcacgggcttgagcgatgagcagtgggtcgccaagcagcacctgtgggacagccttgagcacgagcacgggtccgagcctttttttagcgagttgcgcaaactgtccgagtccgcagacacccttgaggaggacgccgccaaagccgacctgacgcgcaaagtgtggaccatgatcgagtctgcagctgcgcaccgggctctgcgtgacaagctgttcattatggccgcggcgcccaccacctgtgtggatgccggcgcgcaactgttcaatgccatgggcattgaagtgctggtggcccaagcctacgaactggtggccgaggacctggtggaacgccaattgctggagctggcgcgcggcaagtcgcgcttggacgagttgggccggatcgcccgcggcagggttagtgaactggtggctcaggggcgcaaattccccgagtacgatgccgaggggctgcgcgtcacgcatcgtgatgcgcaaggcaacgtgatgcgggacatcgacgaggtggagatctacctgatttacgccaccgagttggcttccgaggacaaactggacttgccttggcaatcggcgcgcatgatgttcgaggagccggatgtgacccctgccatgatcgagcaggcacgcgtgcgagtactggccctggaagagggcgacctgttgcgcaagtcgattggtgagcagccgttttggctgggctttctcaagcagtccaatcccgggccgttccaggcgctgcaggccgaggccgaggcggcgttcgatcggtacgccacctcggacccggcacggttcgaggctgaaatggcgaacctggcgacgcaagacaaggccctggtcgccaagctgaccggccaggccctggaccgtgcgcggttgtcgcgtatcggcgtgccgctcgtgggctagaacaggaaatagcgctgcgccatcggcagcacatccgccggttcgcaccacagcaacacgccgtcggccttgacctggtaggtctgtgggtcgacctcgatgtggggcaggtagtcgttgtggatcaggtcggttttctgcacgtcgcgacagcccttgaccacggcaatctgctttttcaaacccagggcttcgggtacgccggcgtcctgcgcggcctggctgataaaggtcaggctggtggcatgcaggctgctgccgaagctggcgaacatcgggcggtagtgcaccggttgcggtgttgggatcgacgcgttggcgtcgcccatcaggctggcggcaattgccccgcccttgaggatcagcgtcggcttgaccccgaagaacgccgggcgccacagcaccaggtcggcccatttgccaacctcgatggagccgacgatatggctgacgccgtgggtgatcgccgggttgatggtgtatttggcgatgtagcgtttgacgcggaagttgtcgttgcccgcaccatcgccaggcagggcgccgcgctgttttttcatcttgtcggcggtctgccaggtgcgcgtgatcacctcgccgacgcggcccatggcctggctgtcggagctgatcatggagaacgcacccaggtcatgcaggatgtcttcggcggcgatggtttcacggcggatgcggctttcggcgaacgccacgtcttcggcgatgctcgggtccaggtgatggcagaccatcaacatgtccaggtgttcgtcgatggtattgcgggtgaacggtcgcgttgggttggtggaactgggcagcacgttggcaaaaccacaggccttgatgatgtccggcgcatggccgccaccggcgccttcggtgtggtaagtgtgaatggtgcggcccttgaacgctgcaagggtggcctcgacgaagccggattcgttgagggtgtcgctgtggatcgccacctgcacgtcgtactcgtcggccacgctcaggcagttgtcgatactggcgggggtagtgccccagtcttcgtgcaacttcaagccgatggcgccggccttgacctgctcgatcaagggttccggcaggctggcgttgcccttgccggtgaagccgatgttcatcgggaacgaatcgctggcttgcagcatgcgcgccagatgccacgggcctgaggtgcaggtggtggcgttggtgccggtggccggtcccgtgccgccgccgatcatgctggtgacgccgctgttcagcgcctcttcgatttgctgcgggcaaatgaagtgaatatgcgtgtcgatgccaccggcggtgaggatcatgccttcaccggcgatcacttcggtgctggcgccaatggccatggtcacgccgggctggatatccgggttgccggccttgccgatggcgtggatgcggccgttcttcaagccgacgtcggccttgacgatgccccagtggtcgatgatcagggcgttggtgatcagcgtgtcgaccacttcatgggcgagcaactggctctggccctggccatcgcggatgaccttgccgccaccgaatttcacttcttcgccgtagacggtgaagtcctgttcgacttcgatgaacagctcggtgtcggccaggcggaccttgtcaccgacggtggggccgtacatgtcggcgtaggcttggcggctgattttcatgtggttgccctgaagatatgtgttgaatgtgagatcgctatcgggggcaagccccctcccaccttgatgtgtgaacgcggtcaaaatgtgggagggggcttgcccccgataaggccctaaagatcacccatgatccgacctgcaaacccgaatacccgcctgccaccactcaaatccaccaactcgacctcgcgactctgccccggctcgaaccgcaccgccgtacccgccggaatattcaggcgcatgccacggctcgccgcacgatcgaatgtcagcgcgtcattggtctcgaaaaaatggtaatgcgagcccacctgaatcggtcggtcgccactgttggccacgctgagagtgacggtgcgccggccgacgttgagttcgatgtcgccaggctggatccggtattcgccaggaatcatgcaggttgccccagtgtcttgaagtagatggcggtcgggctgtagcgcccgtccgggctttggcagtagtcgggcagttcgccgatcttggtgtagcgcagcgactggtagaaggcttcggccggggagccggcttcggtgtccaggtacagcaggccgcgcttgtgctggcgtgcggcgagctccagggtgtgcatcagttgctggcccaacccatggcgccgtgcattgctgtgtaccagcagcttttgcacttcggcgcggttgaggccgttggctttctggcacagcgccaattgcacactggcgatcacctgctcgtcgcgcaccaccacccacagcagcaggctggcgtcttcgatgctcgcctgcactgtgcccagataagcccgcgcctgggcctcatcgaagtccgccatgaagccgaccgaagcgccatgcctgaccgcgtccagcaacagctcgatcaagcccaggcggtaatgggcaaaactttcagcattgactcgacgcagctgcgcggcgttcatcgatctcactccttgggcggttcggcgcccgggttcaaggccagttgcatgaaggtcaggtccagccagcggccgaacttgatacccacctgcggcatttgcccggtggtgacgaagcccaggcgctcatgcaggtggaccgaggcctggttgccgctttcgatggcggcgaccatcacgtgtttgccgcactcacgcgcacgttcgatcaacgcttgcatcagccgtgggccgaggcctttgccgcgctggtcgttacgcacgtacaccgagtgctcgacgctgtagcggaaaccttcgaagggacgccagtcgccgaacgatgcatacccggtgacttcatcgttttccaccgagaccaggatcggataaccctgggcatgccgcgcactgaaccaggcctggcggttgcccaggtccaccggttgttcgttccagatcgccgtggtgttcagcaccgcatcgttgtagatgtcgcggatcgccggcaggtcgttttgggttgcatcacgaatcatgaccaggcctcacgcgatgggttggtgaacggtgaccagtttggtgccgtcgggaaaagtggcttccacctggatgtccgggatcatttccgggatgccttccatcacctgttcgcggctgagcagggtggtgccgtaatgtatcaggtcggccacggtgcggccgtcacgggcgccttccatcagtgcggcggagatataggcgatggtttccgggtagttgagcttcaccccgcgcgccagccggcgttcggccaccaggcctgcggtgaagatcagcagtttgtctttttcccgtggggtcaggtccatggttcaggtgctccagattcgtggtgaaacggcttcccggcccagcaccgccgggcgcaacaggcgccataaatcgatcagccatgcgcgcgccagcagcgcttcactggccaggcagcgggcgaccagcaagcccggcaattgggtcaggtcgccgcgcacggcgtggggcagggcgcggcaggtttccagcagttcgggttcgatatcgccggtgagcagcaacgtcgcgaacactggctggccgtccagcccgatgggcgactccagcaagccgtcggcgcccacaatgcgctggcgttcatgccagagcaactggccgtcgcggcggatatccagctgtgattgaaaatgccccagagcaaagcgttcaccgctggccggtcgacccagggcaaccacgtcccagtaaaacagacgggcatcgccctgcaggtcgatgcgcgtggtgagttcggcctgggccgcgctgaacacgatggtttcctggggcagccactccagcgtggcaccggcctcaacgctcaattcgagttgctggaacgcagggcctttggcgcgataccacttggcggcaccggggctggtcagttgggcccaggccccttcggcgacatgggcacggatatccaggcggtcaccaccggcaatcccgccgggcgggtgcacgatgatgtgctggcacacctcggggccttcggcgtacaggtgcttttgcacccgcagcgggccctggtggcggcgcattgtcgggcgcgtggtatcaccgaagcgcgcatagccgagttccagctcggcatgccagctgggggtgaacagtgcggtggaggcgggcaggttcatggtgagtgcttgaggtcttttttaaacagcttttccctaggtgtagcaaaggacgtgccggggtgaaacacggattagaggtcggtcctgatggaggcgtgcactgttgtggtgctgtgccgtcttgagcgatttattcaatgcgctgttgtggtgcgctcggccagatatagttaggccccttcagggagggcgggagcgttagatgggcgtttcttcctcgacccttcccgaaggtgctgcacgatggacatccatgacatgccacaacccgatggtgttcggcaaaaccccgtctcagatgggcaactgcctgccctcagcccaccctttatcagcgccgatgatgcggcgtattgggcccatacccaaataggcagcaagcgcgaacgcgagtacggcggtgcgattctcaagcacgcaggccagtatttcgcgacagtgcccaagcagggtgcgaccaagcaaatagcgctcgatagcgtgatcccgatcaaggatggcaagccgatcttgccggcggattacacctgctccgggttttaccactcccatcctgataccgatgatgactttccctcaaggatgttcccggccaggcagcgttcaattctgcgcggcttgttttcttaccccgacatgcaggtcatttttcgcttgagcggtcatgtaccggcgcattatctgtcggggccagatggcactttgttgaaatttgtcgtgcgaacccaggcaaagttgcaggcgtttctgacccggctggaccccgccatccaccctgagatcgactttttcacggactatgtgccggaggtggccgaggccggcgcactgtgggtactggtgcccaacgctgcctggggcggtgtgcgcgggcgggtcagcaaggactgggtgctcaaggagtgggtgaagaacacgcccttgaagggcggcgagcggatgcaaccgttctcttccgctgtctttgcattctcacaactgtcagcgctgattgcctttacggacgaggcgtttgaccagccactctgggggtatctgctcaaggccgcaggccgcgatgaatacgtctatgtgcctggcgagggtaccttggatgaatgggggccgccgcacaccctattcccgcgtgacgccaacggtcagacgcaactgccgccaggctttctgatcgagggcgtcttgatgcacctggtcgataaaaccaggccaccttttttacccgcgcacctggcgagcctgatcgaggtgttggcggacgctcccgctctctttgaccccctgcgcccgccgaccctgtcgcagcggctccccgatggcggcttgaacagttacaggctctcgggcacggatgccgagtcgtcgttgctgggcaagggcggggcgatcgcacaacggcagatcgagaccggcgcgctcacggtgttccgttaccttgaccggttggctagcatgggcgagatggcggtcttgaaggcgggggtgatttggccacgcattggaaaaatacagccgtggtttgaagagttacggccccacttcagcccggattttctcaggcccaatgacgctgcccgctacctctgtgagcaagtattgcggcgtgatatctctcattttggctacatcctgcagcgcaatgacggtaagttcgtggcaaccggactgatcgccgatatcaaccggctggtgggtatggggatgtcgaaaggtagcgttctcgacgtcctgacgttgccggcagattatcgctattacggttttttcgttgccgttggcagcaacccggaagaactgaaacggatgctggcctcccatccggacgttgaaggaaggcgctcgctggatgagcgtctgctgttgacgctgacgattccctatcggaattatgtcgccagcctgacggcggatggtcagcccattccttgcctttactattcgggtacggcgggttcactggtcaagtatgtgagcagcggcagcccacaagagcgcgagtttcatacggcgctgacagcgatcatcgacaccggtatcttcaagccccgcatggatggtttccgtggcacgcccctgcaagtcgtcagcaagatggcaagcctgggtgagttccatgtcatcgagacgaacgcggtcttcggcaactcccgtggcaggctgcctgtgacatggaacgcatttgagtcgtttgtctccgtgtctcctgtcgaaccgccgtacaactggatcgtacctttcccggaactggccgctgaagtggcgcacgggcagttcggcctcaagccgcagctgcgacaagtcgcgtttattttgaaagctaccggagcccaagcgtacttctcgacgcagcctgcgcccatcggcagccggatgttttcaccgtcatcggtttttacccaggatgccaacggtgatccgctgatacccgaggggtatgaggtccacggaatttgctaccagtcgctgcccggtactgggatgaaaacccttcaacactggttgtacgaaagctttgtcgcgccccaggacctggcggctgcaatcgcccaggcccgagagtcgaaccgtacgctgcgtgcgctctacttgagcacgcgtgacggtgcgcaattgcaataccgcttcagcgggacggggttggagagccagttgtatggcgtcacacctaccggggaggtcaacgataatggccatcaggcgagtttgcgctccggagccgtgacgcctacggagtatgtactgcgggtggcggcggcgggcgagttgtcggtgttggtggccggcaagctgtgggacatccagggccgcgtggaaccaacctggcggccctttgcgcgctaccgcatgccggagttcagtgcgccgtttctgcaggccgatgatgccgcacggtttgcccatgaacaggtgggtgccgatcgttatgctgaatactgcggttgcatcctcaagacacccgaccagcgttttgtcgccacgctgccggtggcctgtctggaggcgcagcggtttgccatcggcacggtgtttccggcggaccacaacggtgtgttgctggtccccgagccctacgtgctctacgggcaatacgcgtcatgccggtcggttacccggctggacaagacccgcatgcagcgcaacggctggtcacgggaggaggccagtgtcgattggcaactgttcagcgatgccgatctgcgcaacctcatcggcaaccggcactgggtctccaccggctacctctcctgcgatgaggacggcctgattgcctttgaccttacgggcgccaaggcccaattggatgaattgaacccggacacctcctcggcgccccgcgaaccgcaggcccgggtgcggcacttgtcggccagcggcttgcgcattgtgctcggcagtccgttgtggggattgcctggcagtgtctcgccaacctggcgtgcctatgcgccggcggcaacctttgaaaaaccgcagcaggtggcgtttggcgcagtgttttccactgccagggaagcggttgcagacgctcacaagcgattgcgccggggctattacgcggcccagacgggttttgcttttttgctcaagcacgcgcaaaaggaccagtacgtgctgagccagcttgtccctgcggatggcgccaatccgttgttcaacctggcgagtctgtttggtaaccgcgatgacggtgcgttcatttttccccaggcatttgaattgcacgggttgtattacgcgcgcctgtggatgcccgacaacctgcagaatccgcagcgttggctggctcggcacttcctgtcttcggccgacctgtacagcgccttcctgtccgcccggcgttggcgtgatacgggtagcagcgtgaccttacccgtgtttatttcaaccctggacaacgccgtgctcgagtaccagacggctgtctcgacgccgttgttcgacccggaaaaacaggcgtccggcacctttgaagacgtgcatacccaactgagcggaggccagctatcaccccaggcatttgttagaaaagtcatcggcacgagctggctcggtgtgctggtgcccagtgaatgctgggacgaggagagcagcaggctgggcgccgactggctgccttatgccgacttcagtcgcagggcgttgagcccggcgttctttcaccaggcggatgcgctgcgctacgcccaccagcgcctgggcaatcgccgcgacagggtgtacggcggcttgctgctcaagcgcgtcgacggcctgtttgtcgccaccgagccgctgcccgtcgcgacagagaacttcgatcccaaatggatcctgccggatgaagacgtgcgtgcggactggttggcgccgggcatgacgctggtggcgcgctaccgttcgcggcgggacgtactgcccagcttggtgctggacgaggacggcgaggcggtctatcgagcgatgttgtccaccgatgtgctgggcacggcgctcacgtgccagcacctgtggagccatgagtacctgttcgggctggatggctcggtgatcggtttcagttgcaaaagcgcaacggacgcgacccagcaaggcccgctttccaacgaccttgaagcgctccggcaagcgctggcaccggctgagcaaacgcctcacgacccgctgagcaacgcgctcgagaagcagatgcgcgacggtagcctcacgcctgtggcgttcgtcaatcggctgctcaaggtcgcctcgatgaccgtggtgcaaggcagtgcgctatggggcaatgctcaggtgctgggcagcggatggctgcctgcgcgtggttttaccgcgcctgaccggttcatccatgccacggccgatcgcgccttggggccggtgttcagtcatatcgatgacgccgcgcgcaacgcccatgaaagcgccggagagcgagaccggctgacctacggttttatcttcaagttggccaatggtcactggatggccagcctaccggtggacggtgaagaccgacgtttcccctacgacagggtgttgctgggcgggcgtttgccggtgggctgtacggtggcggcgctctatctgtgcgccccggctcgtcagccgcaagagttgcgcgcatcagcggtctatcacgccttcatcccgccgagtctgttgcgtgcagcgttggcggtggtgcgtacgaaaacaaatgccggggctgcgccttatctgccgttgtacctgtcctgcgccgacagcgccctgctcaaataccgtgcctcacgcctggacagtaactgggacgaagagtcgcagttgcaggcctatatccgcacgttgaatgggcacttcaaccctcacgactacattcgccaggtcgctcgtgccgggcagctcgaggtgctggtgacgggggcgatctgggccggccaagggccggtgtcacagtcctggcgtgaacgtgcgccagctgcggtcgccgcagacccggatgcgcgggtggtgctcgggccgctgttttctcatccggatgatgccgcgcggtatatgtggcgccgctcaccggctgttccaggcaaggcgagcatgggggctgtcctgaaaaatgcagcgggcaacagctatctcgccagtgagccggtggacgacagcgggccgagtgtccacgtggggctacgtatgaatacgagtgcttatcgacgcctgttcggctgggtgatgaacctggatgaacgcactcaaccgcgtcccaaataccctgcgggttaccgcgtcatgggcgtacagcaactgcacaagtgggaggccaatccggagcggctggctgaccgacatgaacaagctatcgccgaaaactttatctcgcagaaggagttcaggtttgtggtcgacatgttaaggcaggataaagtggctggcgcccgctactacttcactcccagaaatggcgccctgttggtctacgcgcccagtttcgagcgcgtcgagcacgacctgctgctgtctggctggatcgaccccgaatcggacaaaccccggctcaagaccagcgaagccctcacggtcttgttcaattccggtcggttgcatgtgttggagcccgaccgtttctggcaacccaaggggcatgtcgcatcgcgttttctgatggagttgcgcaaagcgcagcagactcgactcagatcgtgacgaggccacgcacaccctcgctttccatgtgctcgccacggccctgctgcacgatttcgccccgggacatcaccaggtactggtcggccagttcggcggcgaaatcgtagaactgctccaccagcaggatcgccatgtcgccgcgtgcggcgagcttctggatcaccgcgccgatttccttgatcaccgagggctggatgccttcggtgggctcgtcgaggatcagcaggcgcgggcggctggccaaggcccggccgatggcaagttgttgctgctggccgccggacaggtcgccgccgcgtcggtgtttcatttgcagcaacaccgggaacaactcgtagatgaaggccgggacttccttggcctccttcgcgccaaagcgtgacagccccatcaacaggttttcttccacggtcagccggccgaagatttctcggccctggggcacgtacgcgatgccggcatgcacccgctggtgcggcttgaacgcggtgatggcctggccttcccaggtcaccgcgccttccttggccggcaacaggcccatcaggcacttgagcaaggtggtcttgcccacgccattgcgcccgagcaggcaggtgacttcgccgatcttcacgtcaaaggacagcccgcgcaggatgtggctaccgccgtagtattggtgcagcttgtcgacttgcagcattctcaaacctccttagatcccacataaagcaagccagtgtcctggtcagcgaccgaggtaaacctcgatcacccgctcgttttcctgcacctgctccagcgacccttcggccagcacgctgccctggtgcagcacggtcacgtggtcggcaatcgagccgacaaaccccatgtcgtgctccaccaccatcagcgaatgcttgcccgccaggcgcttgaacagttcggcggtgaactcggtctcggcgtcggtcatccccgccaccggttcgtccagcagcaacaattgcgggtcctgcatcagcagcatgccgatttccaggaactgcttctggccgtgggacagcaacccggcctggcgcggtgcggaggcggtcaggcggatggtgtcgagcacttcatcgatacggtctttctgttcgccactcaggcgtgcgcgcaggctggcccacaccgatttgtcggtcttctgcgccagttccaggttttcgaacacgctgagggcttcgaacaccgtgggcttctggaacttgcggccgatgccggcctgggcgatctgcacttcgctcatgccggtcaggtcgaggttttcgccaaaccaggcggtgccgtggctggggcgggtcttgccggtgatcacgtccatcagcgtggtcttgcccgcgccgttggggccgatgatgcagcgcagttcgccgacgccgatgtacaggttcaggtcgttgagggccttgaagccatcaaagctcacgctgatgtcttccagggtcaggatggtaccgtggcgggtgttcaggcccttgccggccgcctggccaaggccgatggcatcgcggccgctgcccgcatcgaaaatgggttccagcatgacgttcctcatttcttcaacaggccgataacgcccttgggcaggtacagggtgacgaggatgaacagcgccccgaggaagaacagccagtattccgggaaggccacggtgaaccagctcttcatgccgttgaccacgccggcgccgagcaacgggccgatcagcgtgccgcgcccgcccagggccacccacacggcggcttcgatggagttggtcggcgacatttcgctggggttgataatgcccacctgcggcacatacaacgccccggccaaaccacacaacaccgcgctcaacacccacacgaacagcttgaaaccacgcgggtcgtagccacagaacatcaggcggttctcggcgtcgcgcagcgcagtcagtacccggccgaacttgctctgcgccaggcgccagccgatgtacaggcttgccaccagcaaggcgacggtggcgacaaacagcaccgcccgcgtgcccggctcggtaatgccaaacccgaggatgctgcggaagttggtgaagccgttgttgccgccaaagccggtctcgttgcggaagaacagcagcatgccggcaaacgtcagggcctgggtcatgatcgagaaatacacgcccttgatccgcgaacggaaggcgaagaagccgaacaccagcgccagcaaccccggcgcgagcaccaccaggcacaaggcccagaggaaatgctcagtgcccacccagtaccacggcagttcggtccacgacaggaaggtcatgaacgccggtaactcatcgccggaggcctggcgcatcaggtacatgcccatggcataaccgcccagcgcaaagaacaggccgtggcccagggacaacatgcccgcgtagccccacaccaggtcgagggcgagggcgacgatggcgtagcagaggatcttgccgaccagggtcaaggtgtaggccgagatgtgaaagagattgtccggcggcaacagtgacagcaacggcagcgcgagcagtaccgcgaggatcaccacgccgagggcaatcgtcagcttggggccggccttttgcgtggccgtgagcatcaatggctggttcatcagtcgatcacccgtcctttcagtgcgaagagtccctgcgggcgtttctggataaacagaatgatcagcgcgaggatcaggatcttgccgagcacggcaccgatctgcggttccaggattttattggcgatgcccaggccgaacgccgccgtgacgctgccggccaactggccgacaccgccgagcaccaccaccaggaacgagtcgatgatgtagctctggcccaggtccgggccgacgttgccgatctggctcaaggcgacgccgcccaggcctgcaatgcccgagcccaggccaaacgcgagcatgtccacgcgcccggtgggtacgccgcagcaggcggccatgttgcggttctgggtcacggcgcgcacgttgagacccaggcgggtcttgttcagcagcagccaggtcagcagcaccacgcacagcgcgaaggcgatgatcacgatgcggttgtacggcagcaccaggttaggcagcacctggatcccgccggacagccacgccgggttggacacctcgacgttctgcgcgccgaacaccaggcgcaccagctggatcagcatcaggctgatgccccaggtggccagcagggtttccagggggcggccgtagaggtgacggatcaccgtgcgctccagggccatgccgatggcggcggtgacgaaaaacgccaccggcagcgcgaccagcgggtaaaactcgatggccgccggtacgtagcgctgcatcagcagttgcaccacgtaggtggagtaggcaccgagcatcagcatctcgccgtgggccatgttgatcacgccgagcagaccgaaggtgatcgccaggcccagggccgcgagcaacaggatcgaacccagggacatgccgctgaaggcttgcccgagcagctcgccgatcatcagtttgcgcttgacctgggccaggctggtttcggcggcggtgtgcacggcggcatcgctttcgacgcccggtgcaagcagggcttccaggcgcgtacgggccagcgggtcgccggtattgcccagcaaacgcacggcattcaggcgaatggccgggtcggtgtcgaccagttgcaggttggccagggccaggctgagggcgctgtgaacttgctcattggtttcggtggcgacctgttggtcgaggaatttcaactgcgcgggttgtgcgcttttctgcaaggtcttcgcggccgccagacgcaccttggggtcggcggcgagcagttgctggctggcctgcacgttatcgatcagaccgcgcaggcggttgttcaggcgcacggttttggtctcaccgttgacggtgagttgaccttgttgcagggcgtccaccaactcgatgcgcgccgggtcaggctgggcggcccagtcctggagcagcttggcttgttgcgtcgggttggcggccaggaagtcttcggcgtcgctggcgtgtgcggccaaaggcagcaacagcagggccgtgaggatgaaacggtacagggcagtaggcataacaaaatgtcctgatcatgcgcggacaagcttgatgtgggagggggcttgcccccgatggcggtgggtcagtcagcccatgcagagcctgacactcagctatcgggggcaagtcccctcccacatttttatctgcgcttggggcttagttacttttcaccgcatagtccggcttcttgtcattgccaggaatgtacgggctccacggttgtgcgcggatcggttcctgggtctgccacaccaccgagaactgcccatcggcctggatctcgccgatcatcaccggcttgtgcaggtggtggttggtcttgtccatggtcagagtgaagcccgacggcgcggcgaaggtctggccggccagggcttcgcgtactttgtcgacatcggtggacttggctttctcggccgcctgcgcccacatgtggatgcccacgtaggtggcttccatcgggtcgttggtcacggctttgtccgcgcccggcaggttgtgttgcttggcgtaggctttccagtcggcgacgaacttcttgttcaccgggttctccaccgactggaagtagttccaggccgcgaggttgcccaccagtggcttggtgtcgatgccgcgcaattcttcttcgcccacggagaacgccaccaccggtacatcggtagccttcaagccctggttggccagctctttgtagaacggcacgttggagtcgccgttcacggtggagatcaccgcggttttgccgccggcggagaacttcttgatgttggcaacgatggtctggtagtcgctgtgcccgaacggcgtgtagacctcttcgatgtctttatccgcgacgcccttggaatgcaggaacgagcgcaggatcttgttggtggtgcgcgggtacacgtagtcggtgccgagcaggaagaaacgcttggccgcgccgccttcttcgctcatcaggtactccaccgccgggatcgcctgctggttgggcgccgcaccggtgtagaacacgttcggcgacatctcttcgccttcgtattgcaccgggtagaacagcaggccgttgagttcttcgaacaccggcaacaccgatttgcgcgacaccgaggtccagcagccgaacaccacggcgaccttgtcctgggtcagcaactggcggcctttctcggcgaacagcggccagttggacgccgggtcgaccaccaccggttcgagcatcttgccgttcacgccgcccttggcgttgatctcgtcgatggtcatcagcgccatgtccttgagggacgtttcggaaatggccatggtcccggacagcgagtgcaggatgccgaccttgatggtctcggcggcctggagggtccagctcatgcccatggcggcaatggatgccgacagtgtgaaagccttgatcaagctgcgacgcttcatggtgcgatctccgtgtacccaagtgttgttgttggacagatgcaagggcgattgcaaaggctgtgcccgctttgacgggagtgctgtccagggctgtatccgggcggggggctacgcaggccgcactgaaacggcgccgtagcagctgggtggtgcggggcgggcattgttttggtgcgcggcgccgcttaactatttagcgcccggcgaatggggcgcgggaggatggtgggcacttcgattctgccaggagctgttcacatggacgaccaacccacgcgcccgcaacgcgctgcacttgcacggggccacgccaaactgagcaggctgaccccggcgttcatcagcaccgacgatctggtgcgctaccttcatgaacgcatggccccacggttgcagctggaacatgccagcgtgctgctgcaacgcttgtccgacggcctgtatctggccaatgaaccgattcccgaccggcccacggtgttcaactggaacctgctgctggatgtcgatccggtcagccaggactttatggaccctgaaggttttcgaattgtcggtggctggcatgcacacacgaacatgaccgattgggtcaaacgagaaaacccctcgtggacggcagatgaagtcaccgcgttccaggggttttattccgagccggacatcatcatcattttccaggaccgccatcaattcaaggtcgtctacctgtccggccccgatggcacactgcttaagttcgaacccgatgattccacctccggcgcggactacgcccgttggctacgcaaccgtggcggctttgattcgccccatgcccacagcggcaccctcgcggggtattaccagaagctggcgtcgctcgggcgcttgaccttcctggcatctattcccgcctggggcggttcggtgggcgcggtgcccgctgattggcaaccacgcaaacccttcaaggctccagcgctggcgttgccttgcagcccggtgttcatggacaagcagcaagcgctctcccatgcgtggtcgcgcatccagcgcaggccaaacgccaggcagcacgtattgatcctgcagcgtgatgggcatgagcattacctggctggggagccagaacgggaggcctctgtcggcgggcaactgcctttactgcccgcaggttgccacctgcacggcatctactttcactcccgacccttgccgggcctgtaccccgatcaggaagcctggctgttcaagcatttcgtcagccccctggagttggcgcagcgcatcgcgcaatttcgccagtacagccgtggtgtgcagtccaccctcggcgcatcactgtatatccgtgtgcgcgatgaagcgatcttgcgttatcgcttctccggctcagccgccgaatcccggttgttcacccaggccgccgacggcacggtagaggccgatgagctccagtccaaactgcactcgggcgtgttgctgacccgcgattttgtccggcaagtggccagggccggtgagttgacggtggagaaaaccagcgcgttgtgggaccgcagcggtgcggtggacgacacgtggacgccttattcgcaggttgtcttgccggcattgagcgcggcatttctcaccgccgacgacgcggcgctccatgcccaccggcgtatcggcaggcgccgcgagcaggggctcggcgggctgatcctcaagcgcggcgatggtcgcttcgtggtgaccgagccgctgccagccgggccacgcccatttgccttcgccggtgggtacccggtggaccggcagaaacagccgatcattctgcatcccgaccaccatttgcatgggcgctacgcttcgcgcacggcgctgtcgctgaccgacccggcccaggcggtcgagcgcaaatggacccgccaggacaccgagctgaatgcgcagatgttcctggcagacgacgttgccgatctgttggcaaccgggcaagtcggctacctgtcgggtaccgaggactgcctgctggccctggccccttcgaccaccactctggcgtggcgcaagcaatggtccagcgagacggcgggcatgcgcagtgcaatcaaccagcgcctggaagagggcaaggtcaagcctgccgatgttgtacggaccctggccgaagcgggaacgctgcgtattgtgctcggcaatgcgttgtggggcccagccggtttcgtcgaggtggactggggcccttgggtgcgggcgctgacgttccagcgccccgcgaccgtcagccacgggccgatcttcgaaagcgccgatgcggccgcgcgcgaacgacaccgacacgccgcccattactacggtgacgatcatgtcagccgttattttgcgttcgtcctcaagcatcgccagcgcgaagaatatgtcgccagcgagttggtcccggtaacccgccagtcggcgctgctgtccttcacccggttgtacggcggtgcactgcccgagggcttcgactgccacagcctgtactacaacaaaccctgggtcggcaacggcacccgtggctggctgcaacggtttttcatcgaaccggaagacttgagcgaggcgctgtttcaggctcgcgtcaatgcgttgttgtcgcccctcggtgcgccggtgtacatcgcggtgccggacggtgcgctgctgcgttatcagtcgccgtccacccaaggcctgttcgaaaccaacagcatcggggacagcgcggcgacggtgcgcgccaagctcaatgtcggcaccctgacgccgttgcagtttgtgcgcaatgttgcgatttccggtcgcctggaggtcgtccaggccagcccctgctgggaccgcgaaggcacggtcacggggctgtggacgccctacgcgcagttgctgcggcggcgcctgagcccggcgtttgtgtcgatggacgatgccgcgctgtacgtgcgtcgccgtgtgccgacgagcatcgaacacccctacggcgggctgatcctgcggcgcgaagacggctggtttttcgccaccgaacctttgcgggtccccgatgacagcttcgacctgaaatggatcttccccgacgaattggcctcccgtggcgagcatccgccgcgcactgtgccggtggccagttactacgcaaggccggcggaacagtggccgttcatgctgtcgcccacgcagtcgcaggtgtacggcaacctgttttccacccgtgcgctggcgcaggtgttcctgaccgagcgggcgcgcatgcatcactactggctggccgccgatggcgcgttgcttcgtttgaacacgcgtcccgaggaaaaagcgccgcttgtgaccatcgccgacctggtgacacgcccgcgcaatccccatgactggctcaacggtcggctcgaacgcatgctgcgcgagggcgagttgacgcccaccgcgtacgtcaaccgcattgcccagaccttcgccttgcacgtggtcagaggcagcgcgctgtggggcagcccaggcccggtacgcggctggcaaccctttgcgcctgtgccgccggccaacggtgcctatgtgcaggcgttccacgatccggcgtgcagcccggtgcatgtgcaggccgatgacgctgtgcgctacgcccatgaactcgcgggggcgcgtggcgaattgcagttcggctatgtgctggaatcgatcagcaacgggcatttcatcgcgaccctgccgatcactgacgccggcgccaacctggcgcatcggcgggtattcagtgatgccggttaccctcatcgctatgccttgggcggcctgtacctgtgtgcaccgcaggtgtccgaggtggtgccgagcgcgcccgcacaggcaggcgacggcgtctatcaagggctgtttttgccgtcccggctgatcgaggcgatgtaccaggtaacgaccacacaggaacgccctgcgttgcctctttacctgtcgtgcgcggatggggctctgctgcggttcgtggtgcgcgaccctcggtttatcgggtatggcgatgatgtgaagctgcgcctgcggctgctcaccccacgtgacttcatccggcgcatggcggcggccggcgagctacggatcctggtgcccagcgagcattggccggggaccggtatcgtcggcgcagactggcagccgggacgctctcgtggggtcgaaccggcgggcgacaactaccgcgcattggggccggtccatgcgcatcaagatgacgcggcggggttcgtccacgctcgcgccgggcgtttcacggggcaacaggcgatcagcgcgttgctggagagcggcggggtgatgggcaagcatgtaccggtgctggagctgccggaccatggtttcccttcggcgacggcagcgcggttatttgtgacggggccgtggcccgcaggcttgcaggtgcgggcggcgcatctgctgttccatgccgggctggatcagccgcagatgggcgtcgagcacttgtatggcgagtacttcgtgagctttcgtgaactggcgtactacattcattcgctcaaacagcagggcctggcgatcaacgggttttacctcaccgcccgggacggtgccttgctcggttatgcgccgcgcttcgaccaggccgagtacaacctgctggcaaccaccggcaaatggagcgccgaaggcggctacacgaggttcgcgccagacccctcacacgtgttggccgaactggcgcgcaccggccggttgcgggtactgcacagtggtgagttctggaccctgcgcggcgcgctgggcatggacctgaagctgcccggcagccccggcgggcgaccgtccagggacgaactctgaggcggtcagcgccggcgcatcaaaccgatgaagaacaatccgccaatcgccgccgtggccacgccgatgggcaggtcttcgggggcgatgagggtgcgtgcggccacgtcgacccacaccaggaacaagctgcccagcagcgcgcacaccggcagcaggcggcgatgctcggcaccgacgagacgtcgggcaatgtgcggcaccatcagcccgacaaaaccgatggagccgctgatggagaccagcacaccggtcatcaatgaggccaccaggaacaccttcagccgcacggtacgggcgttcaggccgagggtcacggcggtctgctcgccggccatcagcgcgttcaacgggcgcgccatgcccagcagcaccagcagccccagcagtaccgtcaacgccggaatcgccagcagctcccagcgcgccaggccgaggccgccgagcatccagaacatcaccgccgaggcggcgcgatggtcacccatgaacagcagcagattggccgccgccatcatcacaaacgacaccgccacaccgcacagcaacaggcgatcgctttccagccggccgttacgactggctacggccaacaccaccagcatgctcgccaatgctccgataaacgcggcgatgggcagggtcagcaggccgatgacttcgcccacatgcagcaccacgattaccgcgcccagggtggcgccggacgtgacgccgagcaggtgcggatcagccaacgggttgcgcgtgaccgcctgcaacactgcgccgatcaacgccagcccggcgcccaccagtgcgccgagcagcatgcgcggcacgcggatcagccacacgatatgttcctgcccggccggccaattcacttcaccgatgccgagcgccttgtacagcaggattcgccacaccacgtccaccggcacccgtgccgggccgaagcccagcgacaggacgcaggagaccagcagcaccgcgccaagcgcggcgagcagcagcccatagcgacgggtgatcattcgccgtggaaccccttggccagggtttccaccgccagcacgttgtcgatacccggcgtggcctgcacgtaagggatcacgataaagcgctggttgcggatcgcatccaccgcttgcagcgccgggttgtcgagcaggaattgctctttctgttcggcagtgacttcgctgtagtcgacgatcacgatcacctgcgggttgcgctccaccacggtctcccagttgacgcgggtccaactggcctcgatgtcatcgagaatgttgcgcccgcccgccgcgtcgatcagcgcctggggcatgcccaggcggccggaggtcatggcgcggtcttcaccgctgtcgtagaggaacacccggggcttgtcggcgggcaggtctttttgtacctcggcgacctgcgcctgcatctgcgcgatcaaggcattggcgcggtcctgcacatcgaagatcttgcccaggttgcgcaggtcgttataggtgtcttccagagtcgcagccgggcgcttcatcacgaaggcacaggattcggtcagctcatacacgttgatgcccaagggttgcagcgtgcttggtgtgaggtcgccgcccacacgcatgccgtagtcccagccggcgaagaagaaatccacgttggcgttgagcagggtttccaccgaagggtacttgctcgccagctccggcaggccgtcgagcagcccggccatttccggggtgaccgacttccagccggtgacgccgctgtaaccggccatgctcggcttgaggccgagggcgagcatcatctgggtcatgttgatgtcgtggctcaccgcgtgtttcggcgcttcctggaaggtcacgtcgcggttgcagctcttgatggtaaccgggtagtgggtcgctgcggcgagtgccccggcggtattgaacagcaaggtaatggcaagcagcgaacgcaggatcatggttgggttatccaggtgattcgggggtagccggacagcgggtgggtatcgatcaacgcctcgacgccaaacacatcgcgcagcagttcgcgggtcagcacctcatggggcgtgccgttggcgacgatgcgcccgtggttgatcacgtacaggcgatcgcagaaggcggcggccaggttgaggtcgtgaatgctcgccagggtaccgatgtgcaggcgcttgaccaagcgcaacagctccagttggtaacgcgggtcgaggtgattggtcggctcgtcgaggatcagcaattgcggctgctgggccagggcccgggccaggatcacacgttgtttttcgccgccggagagagtggcgaaggcgtggtcctcgaagccttgcatgccgacggatgccagcacctgctggatcaactgccggtcgtgcagcgtgtcgccgtcgaacaggcccttgtgcggcgtacggcccatggcgaccacttcatcgacgcgcaggccgaaggcatccgggaactcctgcaacaccacggcgatgcgttgcgcgcaccacttcgaactctgtttccacacgttctgatggtcgagcaacacgtcgccctgcgccggtttgctgaaccggtaggcgcagcgcaacaggctggtcttgccactgccgttaggcccgatcaggccgacgaactctcccgcaccgacctgcaggctggcgtcacgcagctggaaccggtgatggcagtggtcatgccccggcggggtccaggccaggtcggtgagggtgagtgcggtcatcagaaggtgtagtccgccgtgacaaagaacgagcgtggttcaccgaggatccactgctggccgtcgttgtattggctgacggcataggtgcggtcgaacaggttgttcaactgcaggcccagggtggtgttgcgcagggctttccacgatacggtggcatcgaccacggtgtagctgggcaactcgttctggttggccatgtcggcatagcgtgcatccacataacgcacaccggcgccggcgcggacattgtcggtcaccgccttgctcaaccacaggttggcggtgcggcgcggcacgtccaccgggcggttgccgtcgcgggagacttgcacgccgttgacgtcctgtttgaagtcgtcgtattgcgcatgcacgatggccgcgttggcttgcagttgccaggcgtgtggcagttgcaggtcgaggctggcttccaggccacgggaggattgctggccgacttgctgctgcaggctcgggttgcccggcacgtcggtgagcagtttctttttgacgatgtggtaggcggccaacgtccattcaccgcgctggtcccagaaggcttgcttgatgccgatttcagtctgcttggcggtggacaggtcgaactgctgctggccctggctcagggaaatcaggccaccgacgccgtcggtgctggtggcgtactggccgtagaccgaggtgtcgggcgtgatcgcgtagaccaggccggccttccagttattgccggtaagggtcttgtcggactggctgccggtgcgcagttcttcgcggtcgatgtgcgcgtagtcgcggcgcaggccggtgatcagcgacagttggtcggtgagttgcaggcggttttccgcaaagccggcaacggttttggtggtggtggcgaacagcggcttgaacgggtcgttgctggcgaactggcccggggcggggtggttcacgtcgatgggttggccgctggcaaaggtgtcggtaaacggcgagttgctggccaggcggaagcggatacggttgtattccacgccggtcacggtctggctgtcgaggccgaacaggctgtgcttgaaggtgaaggtctggcggtcgccgacctgttcctggttgtgcttgatgccgtagttgccgctgcgggtcagttggccgccggtgaagttgtagttctcggcgttctgccagcgacgctggtttttcaggtaatacagctcgttggtggcgctgacgttgtcgttgatctgccactcgctggtcaggcgcgtccactggtcgttgtagtgctgggtgtcgttgctgacgttgtagttcttgtcgcgcaggcctttgtgcaactggccattgatcagtggtgtgccgaagtagttctgcgggcgctggtcgccgtagtcgctggcgaaggtgaagctcaggttgtctgccgcctgccagcgcagggcaccgctgacgaagtcgctgctggagtcgccacggtcgataaaaccgttgctgcgcaggcgattgaggttcaggcggtagctcagggtgtcggtcagcgagccgccgctgtctagggcttgttgctggcgatcgtaggaaccgtagccgaggcggatgtggttttcgatcgcgccgtcgaagggctttttcggcacggtgttgatcaccgcaccggtggcgccttcgccgtacagcaccgaggccgggccgcgcagtacgtcgacgcgctccaccgaccaggtgtccaccgggaaggtcgaggtgcccatgcccatgtacatgcggttgccgtcatacaactgcatcaccgagccctggccggtaaaaccccgggccgacaacgaggtgccgccgtcgcccggcgtgccggtgcggctgatgccggtggcgcgggaaatcgcgtcctgcacactggcgtcgccgcgttcgcgaatctgcgtaccggtctggctctcgacgctgccgggggtttgcagggccgtgagattcaggcgcgagccggcggtggtcggggtcttgaggtcgacgtgatcatcgtccacggcaggtgcggtgacagggctggcgggcagggtcagggcctgggcgctggtatgcagggcgagcaggcacaggccggacgcgaggtacttgttcatcgggtggaaaatcttcttggcggcagtgctcgccgctgggcgcggcgagctgaggtatgcagtaagtgttataagttaacacttcctacgtcgagggtgaaagcccgcgtaagactacataacgcctctatgtggggcatctcgcctatttcatgtcgaacctgaggcagcttcacgttgtgcgaacagccgcgacagcaccaggcgatccaacacccacaccacgatcaacgacgcacccaccagcgggaaaacgatcgccagcccgagcatgatcaccatcgcggttttccacttcggcaggtcatggcgcagcggcggaacacccagcccgcccaccggccgacgcttccaccagatcaccacgccgctgaccgcgctgagcaggatcatcaggcagatcagcagcacgatcagctggttgacccagccgaacatcttgccctcgtgcagcatcaccccggtctcggtggcgcgcgccaccaggttgtagtgctcccagcgcacatcggcgaggactttgccggtgtactggtccacatgcaaggtggcgtcgttgcgtgggtcgttggcgaacaccgcgatggtgaatacaccttcggcggtggtgggaaaggtgatgctgtagccgggctcgacatggcgcgcgttggccaggtcgaccacttgttgcaggcgcaacgcaggtgcagccggcgcagcgtgcagggcgccgtggttcatgtgctcggcgtggtcgccggacatcggcatcggcgtgttctccatggcccacggcacggtctgttgactggctgtattgaggctgcgcgcctgttggtcggactgcggcacgttgttccacatcgccgctggaaagcgattccacagctcggcgtattgcttgccccagaagccggtccaggtcatgccgctgagcagcatcaccagcaacagcgaggcgccccagaagccggtgaccgcatgcaggtcacgccagagcacccggccacgggcagtgaagcgcggccacaatacgcccgccgatgatttgccacgcggccaccataggtacaggcccgacaccaccagcatcacgccccaaccggcggcgagctccaccaggcggtcgccgaccgtgccaatcatcagctcaccgtgcagggcgcgggcgatggcttgcaggttgtatttggcatcctgttcgccgaggaccgtgccgcggtaggggtcgacaaagaccgtcacttcgcgcgcgttgttatgcatcacgaactgcgcgctgctggtggcgtcggcggggggcaggtatttgctgatcgcggccttggggtaggccgcctgggcgcgttgcagttgctcgtcggcgctcagggcgtgcgcggcgctttgcaccttgagcaggtcgccgtacatcagcgggtcgagctggggtttgaacaggtagatgatgccggtcagggccagcagcaccatgaaaggggcgacgaagaggccggcgtagaagtgccagcgccaggccaggttgtagaaggaaactttttgagtgctcatcattgggctccgcaaggctttgaattttttgtgtctggttggccgtcatcgggggcttgcccccgatgctcctagaagctcatgtcgactttggtccagagcgttcgccctggctccttgatggcttgcgggtcggtggccgggtagccgaacccggcgttgccggccaggttcaggtgctcggcgtaggccttgccgaacaggttgtcgacgccggtgctgaccttgaagtgtttgttgatgcggtacgccgcgttcagcgagaacacgccaaaaccgccgctcttgtcgtagtccttgccgaccacgttgcccttgttggggtcgatgcggtgttgcgccgccaccacgcgccacaacgccccggcgctccagtcgtcttcgctgtaggtcaggcccaggcgtgcatccagcggtggcatttgcggcagcgccttgccgtcgctgctgttcttgccccaggcgtaggcgagggtggcgtcagccttccagttgcgcgtcagcttgtacgccgcgcccaattcgccgcccatgatgcgcgcgtcgacgttgcgggcctgggaggtggtacccatcatcccgggcctgtagtcgaacaggatgaagtcctgtacccggccgatgtaacccgaggcccaggcttccagatcgtcggctttgtactgcgcgccgaagtcgagctgggtggttttctccggcttcacaccgtcgaaggcattcaccgaaccgaccgcgccggtgttgggcgaaaacagctcccagtaatccgggaagcgttccgaatggcccaggcccgcatagacggtggtggggctgtcggccaggtcgtgttcataccgcacgaagcccgatggcagggtgtcggcgcgggtgtcgtcggcggtcgggttcgggcgggacatcatccccgagccgctggtttggcggaaatccttggccgaggcgcggtccaggcgtgcgccggtgatcaggcggtcgcggtcggcggcgtaccaggtcagttcgccgaacacgccgtagttatggaagttggcgtccttgacccggggcaagtccttgtaggtgtcgatgcccatgctgctgcgctggcggtgttcgttggtctgcgcgtcgaggccgctgatcagttgcacatcggcccagcgccaggtggccttgatccgtgcgccgagggtgcgccggtcgacgttggaggccatcggcccagccatcatcccggtgccggacggtgtgcgcaggctgtagttgtccatcacatggtcggcgtagttgtagtagacctgggcctcgaccttgtccagcacctcgccgatgttggacttttcaaagcgcagcccgaggctttcacgcaggaactgcgaaccgtccataccgcgcccggcgtaacgcgcttcgccatcgccacggccggcggtgagttccagcagggtgtcggcgtcgggggtgaagccgaccgccacatcaccgttccatttgtcatagcgcgaggcgacggtgtcgttgttgccgtccttgtagtcatcggcgtgggcctgattgccgatcacccgcacatagcccagcggcccgccggcggcggcatcgatgaccttgtcgaagcgcccgttggaaccggccagcacactggcgttgaggcgtgtgcccagctcgccgaactgctccggctcgcgctcgaacaggatggtgccggccgacgcgcccgggccccagagcacggtttgcgggcctttgatcacggtgagcttgtcgtaggtctccggcgagatgtacgaggtgggcgcgtccatgcggccggggcaggcgccgagcatcatgctgccgttggtgaggatgttcagacgcgagccaaacatgccacgcagcaccgggtcgccattggtgccgccgttgcgcaccagggcgaagccggggatggtcttgaggtagtcgccgccatcgctggcgggcaccggctggcgtgggtctttggggttggtgataacggtcagcgctgagctgggggcgatcgccgtgatcacggtgggcgtcagctcatgttcggcgtgctcgtcggcctgagcgtgaggtgccagtagcgcaccgcacagggcggcgagcacaggggtatatcccaaacgggtgtcagcagaaaacctggacatgacaaattccatcaatcagtcgtaaacaacacggccagcagcctgcggctgtctgtctaaagtcggccgggggtgaagtaacggtgttaagtgcttacgaagcgatgggcggcgcgcggctgcgggcgccggggaagatgctctgccgggcatggcccaggcgtgtggcgggggtgagggcgttggccggcggcgggctgctcagggtgaaggttgaaatgccgccgggcagggcggggcagctatagagcaggtcgcaatagccgcacttggaccagagggcgtggtgttcgtcaggtgccttgggttgatgggaggcgccgtggtccatcggcatgtccatcgacataccggcgtgatgatccatcggcatcgcttgggaaatcagcggaccgataaagatcatcagcatggcgaacaggctgatccaactgccgcttctcaggcgggcgtgtggagacaacctggcgcgaggggcgcccatcgcgtgtcagcctattgggcgtgcttatgctcgtgtgtcgccatcggtggcaccttctgcaccgacacttccacctcgaccttgccggccttttcgaaggtgagcgtcagcgggaattgcttgccgtcggccaacaggctgcggtccttgaggcccagcagcatcacgtgatacgccatcggcgcgaaggtcagctcgcccttggccggtacggcgacgctgggcacctgctgcatcttcatcaggtcgccctgcatcacatgttcatgcagctcggccttgtctgccactggcgtgtcgacgctgagcaggcggtccggggtctcaccggtgttgtgaatcacaaaataggcggcgacggtcggcgcattcggtggcaactcctgggaccagggatcgctgaccagcaggtcgccagccttatagtcgtcggcattggcagcactgaacaccggcagcaacaacgcagccagaagcagggatgatttgagcatggcagttctccagaacggttctaaacgcagttcaattgcgaagaagatcagaccgttggagaggcgcgggggttgaggctcggccattgctggcgcagggtggggctttgcagctggggcggcggcaagctctgtgaagtattgaattgggtgagatacaactgcggcacatgccccggcaacgccaccaacggcgccgagcccgagcagcaccagcaatgctgcatggtggaatgatcgtcctgctgctgcgccggaatctccagcttgcccagggcgatggtcttgaggctcgcgccattggaggaacagaaactgccccacagcaattgctggaccgggtcgctggactgttgcatcgcgctggccatcggcatggcaaaggcgttgaacagcactgcaaggcaggcgatccaggcaattgcaaagcgttgacgggccatggcggacaatccgtagggttaaacgatcaggcgggtatttagcctgatcgtaggggataagtaaaaaggggcggtgtggtttggtgtcgcagtgacgggtttgaggatagacgggtaatcgagtggatgccgatcttcaaagctgcacagttcaaatgtgggagggggcttgcccccgatggcggtgggtcagccgctgatttgttgactgagctgacgctatcgggggcaagccccctcccacatttggccggtgttcgacaatgaataggggcaagcagaaatatccgacaggcctttaaggttgtccctaggacactcaaactctagtctccgtacaccgctgcaaacgcagcggtcgggcgtcgcggcccggacttctccagacgccgaagcgtcattgcctcctttcagttggcgtttttttatcgtctactgtgcggcgctatggcggctgtgcgcgggataccttcgggtatgccggtgttctggagaatcggtccgcgaacctgcgtacagctgccacccccatcgcgtcgcggcgatcagtggcagctcctctattacttctccggagcttcacaatgatcaaacccaccccaaatcccccccaccggctattcaccgtagccgacggcttcagcaccgaagacctgttggtcaatctcagcgaaacccttgcctcggcgaatgcgctgagttgcgatcttgcgtttgacctggaaggctcgaaacgagatgaattgctcggcgttgcgcagttgattgagctggcgctgctgctggctgatcgtgtgcatgatggtgtagggcaaacgaaaaacgctgcgtgatgatgcagttctaaaggtgggagggggcttgcccccgattacggtgtgtcagtctatacatctgtgagtgatctaccgctatcgggggcaagccccctcccacatagaatcgatggtgtttagagagtggtgattgcctgtagaaccgcaggcacagtagtgaattctcgatccactgctgccaacaccggccgcttcaacaccaacaccggcactccaagctcccttgccacttccagcttcggctccgtcgcggtgctgccgctgttcttgctgatcagcacatcaatgccacgccgtgcgaacaacgcacgctcatcttcgatcaagaacggcccacgcgcgccgatcacttcacagcgctcgttccccggatacacatccaacgtgcgcagtgtccagaactgctctggcgggatctcatcaaggtgctgcaacggctctcgccccaacgtgaacaacggacgcttgaagggtttgagcgcttcaatcagcgaagcccaatcactgacctcgcgccaatcatcccccgcctgcggctgccacgccgggcggcgcaaggcccaacatggcacgccgctcaactgcgcggcctcggcagcattgcggctgatttgtgctgcatacggatgggtcgcgtcgagaatcagactaatcccctcattccgtacaaaccgcgccaacccctcagccccaccataaccgccgacccgcacctggcaggtcaggtcggtgggcacgcgcccaaccccggccaggctgtagatatgttccgggcccaatgtacgagcaatggccagcgcttcggtcacgccgcccaacagcaggatgcgtttcatagcggcttgaccacttccagcaaggtaatcggcaacgcctggcgccatgtatcaaactcccccaacggctgcgcctgagcgacatggatgcgcgtcagttcgccgccatactgcgcgcgccagttcatcaaggtcatttcgctttgcagggtcacggcgttggcgaccaaccgcccgccagggcgcaggtgttgccagcaggtgtcgagcacgccttcgcgggtcacgccgccgccgatgaagatggcgtctggtgcttccaggccaagcaatgcagcgggggccttgccgcgaatcagttgcaggccgggcacgccaagggcgtcgcggttgtgttcgatcaggccttggcggccttcatcggcttcaatcgccagcgcgcgacaactgggatgcgtgcgcatccattcaatcccaatggagccgctgcccgcacccacatcccacagcagttcgccgggcatcggcgcaagacgggcaagggtcatggcgcgcacatcgcgtttggtcagttggccgtcgtgcttaaaggctgagtccggcaaacctgcacgacgcgacaggcgagcagtatgggcgtcggccaggcagtcgatggcgacgaggttcaaatcggcgaccgaggtgtgttcccacgagtgcgccaacccgtcgatgcgctgctcatccgcgccgcccaagtgttcaaacacagacaaacggctagcaccgaacccggattcgcttagcagcgaagcaatcaacgccgggctgcgcccgtcattactcaacaccaacaaccgcaccccactggccaggtgcgcattcagcgccgccaacggccgcgccaccaccgacaacgtcaccacgtcctgcaacggccagcccaaccgcgctgccgccaacgataccgacgaaggcgccggcaagatcagcagctcatccgccgccacctgccgcgccaaactcgcccccacgccatagaacattggatcgccactcgccagcacacacactggctccccgcgccgcgccagcaccggctccagcgaaaacgggctcggccacacctggcgttcgccacggatacacaccggcagcaggtccaactggcgctgagcacctataatccgcgtggcgcgcaacagggcatgccgggcgttcctgcccagccccttgaagccgtcttctccgatgcctacaaccgtcagccagggcgacatatgaattccttgaacgacatccgacgggcaggcttttcatgccgccggacaaagcaggcataataccgcgcctttacccaccaaccggtagccccgtgaacccaacgcccgctgtgaataccttgcgcccctcggcctgtccggggttgctgcgtattgtccaggcgttggatggcggtatttgccggatcaaattggccggtggttcgatcaccagcaagcaagcccaagtggtggcagatgcggcccaggcctatgcgggcggggtgatcgaggcgaccaaccgcgccaacctgcagattcgcgggattggtgcccaagagcaggcattgatagccctgctactggacgcaggcctgggtcccaacaatgccgccggcgacgatgtccgcaacctgatgctcagccccagcgccgggatcgacccgcagatgctgttcgacacccgcccgctggccgatgagatcctcgccaccctgcaaaaccacccacgtttccatgaactgtcagccaagttcgccatacagctggatggcggtgaagccctggcgatgcttgagcatcaccacgacctgtggctgtcggccttcatccgcaacggccagacgctcctcgcgttcggcctggccggttgcccggggctggatgcgccactggccgccgtgccgctggagcaggggcatgcgctggtggtggccgtgctggaggcgtttctgaacattgccactccagaacaaacccgcatgcgccacctgcctgtggataacgtgctgagtcatttaaaccagccgctattgcctgttgatggcttcaaacgccagcccagcggggctttgctgcaccttggcacttatccacaggatcaaaagaatcagttttatgttgccgccatcgcacccttgggccgcctggatgcgacgatgctcaaaggcgccgcgcaactggccagcgagtacggtgatggcaccctgcgcttcaccccttggcaaggcgtgttgctgcccaacatcgaaaaaccgtacgccgtgaccgagcgcctggcgcaactgggcttcctttgctccatcgatcaacccctggcgcgcatgaccgcctgcaccggcgccagcgggtgcggcaaggccctggccgacaccaaggccgatgccgtgcaactggctgccttgcagcccggccatgacgtgcacctgtccggctgcccccgttcctgcgcggctgcgcacgttgcgccggtcaccttgctggcggtgagccccggccactacgacctctatttccgcgacgcagcccaacccggtttcggccggctgcacgcgcgcaccctttccattgaagcggcgggcgccctgttgcgcgctcgtccacggagcaacaccgatgattgattacatccgcgacggtcaggagatctatcgcaactccttcgccattattcgcgcggaagccaagttggagcgcattccggccgacctggaaaaactcgcggtgcgcgtgattcatgcgtgcggcatggtcgaggccatcgacggcctgcagttttccgaaggcgcgggcaaggccgggcgcgatgcgttggccgctggcgcgccgatcctgtgtgatgcgcggatggtctccgagggcgtgacccgcgcgcgcctgccggccaataacgcagtgatctgcaccctgcgcgacgacagcgtgccggcgctggcgcgggagctgggcaacacccgttccgccgccgcgctggagctgtggcgtccgcacctggaaggcagtgtggtggtgatcggcaatgcgccgaccgcgttgttctacctgctggaaatgctcgatgccggtgcgcctaaacctgccttgatcctgggtttcccggtcgggtttgtcggtgctgccgaatccaaggcgatgctggcggcggacagccgtggcgtgccgttcgtgatcatgcagggtcgcctgggcggcagtgcgatggccgccgccgcggtgaatgccctggccacggaggtcgaataatgccggcacgcggacgtttgatcggcctgggcgtaggccccggcgacccggaattgatcaccctcaaggcgctgcgcctgctgcgcgaatcgccggtggtggcgtatttcgtggccaagggcaagaagggcaatgccttcggcatcatcgaagatcacttggtgccccaacagaccctgatgccgctggtgtacccggtaaccaccgaggtgctgccggcgccgatgtcctatgagcaggtgatcagcgatttctatgacgccgccagcgtcgatgtcgccgcgcacctggatgccggccgtgatgtggcggtgatctgtgaaggcgacccgttcttctacggctcctacatgtacctgcatgaccgcctcgccgaacgctacgaagcgcaagtcatccccggcgtgtgctcgatgctcggcggcgcctcggtgctgggtgcgccgttggtgtatcgcaaccagagcctgtcggtgctctcgggcgtgttgccccatgaggatctgaagcggcgcctggcagacgccgacgcggcggtgatcatgaagctgggccgcaacttcccgaaagtgcgccaggtgcttgaagaactcggcctggccgagcgtgcgctgtacgtggagcgggcgaccatggccaaccagaagattgtgccgttggatcaggtcgacccggcgtcttcgccgtacttctcactgatcatcgtgccgggcgaaaggtggcaaggttgatgaacccggcgattgtcattctgggccagggcagcctggccaccgcgcgccggatccaacagctctaccccgaggcgcggatccacggtctggccgggcgcgttggaggtgctgaccagacttacagtgagttcggcacgaccttgcgccagttgtaccagcaaggcacgccgctgattgcgctgtgcgccgccggtatcgtgatccgcaccctggcgccgctgctgctggaaaaaggtgaagagccggccgtgctggccgtggcggaagacggcagcgccgtagtgccgctgctcggtggccttggcggtgtgaacgtcatggcgcgcgagattgctgccgcgttgaacgtggccgctgcgatcaccaccagtggcgaactgcggtttggcacctgcctgctcaacccgccgcagggctatgagctggccgacctcgagttgggcaagcggttcgtttccgacctgttggccggtgaaagtgtgcgcatcgaaggtgtagcgccgtggctggatcaggccaacttgccgcaggatcaacaggcgcgcctggcgattcatgtcggcagtgccgagcgccaacccaccgccaatgaattgctgatctacccgaagaacgtcagcgtgacctgcaaacccggcgcgcaattggccgagcgtgtgcgcacggcattgcatgaagcgggtatcgccgtgcaatccctggcgtgcctgctggccagcgaaacgcagatggccgaagcgtcgttgcgtgacgcggcgttggaactgggggtgccgctgcgttttaccggcgtttcccaggacgccgatatcgtggtcagcgtggctgaacagccgctggacttgtcgcagatcggtcgtgttcgtggccgccttgccgtgatcggcctgggccccggtgccgccgagttgatggtgccagcggtgaaggctgaactggcgcgttgcaccgatgtgctgggttacgagacctatgtgcgcatggccggcccgttccgcgaggatcaagtgcaacactgcaccgataaccgcgaagaaatgcagcgtgcccgtcacgccttcgagctggcggcccaaggccgttcggtggtggtggtgtcgtccggcgacccgggtgtgtttgccatggctgccgccgtgattgaggcgttgcacgaatccagcgacccgacctggcatcaggtcgacctggagatcctgccgggcgtctcggcttcgcttgccactgccgcccaggccggcgcaccgttgggccatgacttctgcgtgatgtcgctgtcggataacctcaagccctggtcgatcatcgaaaagcgcctggacctggcgtcccaggccgacctggcgctggcgttctacaacccgatctcgcgttcgcggccttggcaactggggcgcgccctggaaatcgtcgccctgcatcgcacaccgcaaacgccggtggtgctgggccgtgatatcggtcgcccggggcagagcctgcgtgtcactacgttggggcaactgacgccggagcaggtggacatgcgcaccatggtgctgatcggctcgtccaccacctgcacattcccccgtgccggtgggggtgaatgggtctacacaccgcgctggtacggtgaaaaacccgcctcctgaaaacggcctgtcgtctgcctgaaagcgccgaattgcccagggattttcctggcgttgttcggcgctttttcttttttttgcgacgaaatatggaaactcacccgtgatgccgcgttattgctgggcgttgtggttcaacgggttgcgccaagggatttttatcgtctggaaagcccatcggccagtgaactagggtggacacaagccccacgttggggtgcttgtggagaatcaaaatggagcgacatcacagacggatcaacagtacaaaaaggcgcaagttgattgccgcctacaaattaccgggcgcgtcaggcaagcacgcgtctgtaccgctggacaccgaagatgacttcaatgcggcggtggtcaacaacagtgtgatttcgtttgccgaaggcctttcgggtctgaaccgagagtacgtgcgtaaaagttatctgctggccagcagctacgtcagcgatgtgttgaatgtgcaccgcggtaccgaggactggtacgacgaattcatcaaggtgatggtcagcctggggtggctcccggtgcgtagcagcttcgaacgggtctcacgttcgggcaaggggctgaccgtgcagttggcggcgctgaaccttattgccacgctgttggcttccacgtccttgtccgcgccgctgcttagcgtgatgccgaaactggcggcggatgcactggaggcgttgaagcaggcgccggcgtcttttgaattgttcaagcgcaacagctcggtgcaccagggcggtgatttcggcctggcatcctgtgccgaaaccgatggcgaattgacgatggtgctggtgacctacagcactcacggcgtgagcaaacaggtagggctgcccttcctggagtgggacagttcctcgtgcgaggccttcagcgggcagacgtgcctggtgctgaatacctcggtggtcaacgaaaagacgatccaactgatgcgcgagagcgcgggagacaaagtacaactggcgattgccaaataccggatctaaggcaccaggtagccgcgtaccccggtgaagatgatctgcgcggccagggcgcagacgaacaggcccatcaaccggctgacaatctgcaagccctggtcaccgaggatgcgttcgatacggttggacaggtacagcaccacgcccaccgtgaggctggccagggcgatgctgaggatggcggtgagcttgtcatcccagtgcggttggctcacgcccatcaccagcagcgcaccgatggtgccggggccgacggtgagtgggatggtcagcggcacgatggtcacatcctgctgcacgttgtcggtctgcaccgccgacttgccctgggccatgcccagggcggaaatgaacagcacactgccggcgccgatgcggaaggcgtcgacggtgatgccgaacacactgaaaatcacccggccgaacaggtacagcaatacgctcgataccagggtcgccaacgccaccttccacgccaggcgccgccgctctttgctggaatagccacgggtcaggctgataaagcaggacagcacgaagaacgggctgtagagcaccagcattttcaggtagacgctgaataacacgtggagcatgggggcggctcgcaggaggaaagtgtggagagtctatcaggcgccagagatcaaatgtgggagggggcttttgtggtgagcgggcttgccacgcgctgggctgcgaagcagccccaataagaacgccgagttatgtcaggcactctgcggcgtttggttttagggccgcttcgcgccccagcgcggggcaagcccgctcaccacaaaaaccagttcctacaggagggcagcgtttcaagttaagacggggcgtgctcgggcctttgctgacgctgcgccacccaaaactccaccagctcgcgcaactgcgacaactccaccggcttggccatatgcccatccatcccggcctggcgcgcacgctccttgtgttccgacagaatgtgcgccgtcaacgccaccaccggcgtgcggatgcgctggtggctgacttcccaggcacgcagctgctgggtcgccgagaaaccatcgaggatcggcatttcgcagtccatcaacaccaggtcataacgctgggccttcattgcttccagcgcttcctcgccattgctggcagtgtccgggctgaggttgagcttgccgagcatgccgcgaatcaccttggtggagatgctgttgtcctcggctaccaggatgcggaaatccgtcggcacggtgatggcggccggagcgctgaggaccgggcgtggcagcacgttgcctttgctgcgttgggtcagttcatccgccagggtggtcttgagcgtgtagccggccaccggtttggcgaggatgcgcttgatcccgcaattgcgcgcgatgatcttgctcggcgcgttgctgatgccggtgagcatgatcagcaggatgtcgtggttcaggctcgggtcttccttgatctttgccgccagttgcatgccggtcatgccgggcatgttctggtccagcagcaccacatcgaagtaatcgcgcaggtgcgccttggtgcgcagcaacgccagggcttccttgcccgagggcacggcgctgacgttgaggccccaggccgaacattgttgcaccagtactttacggcaggtgtcgttgtcgtccaccaccagcacgcgcgcgcctttgagcgggccgtcgaggtcggaggtcgggtgttccaggcgttccgggtccagcggcagggtcagccacagggtgctgccctggtggctgccgctcttgatgccgaactcgccattcatcaacaggatcaactggcgggcgatgaccaggcccaggtggccgttcaaacgggtggccgagaagaaattcttgctgtgcagttcgctgtgcagcagggcatcgcgctcggcgggttccatcggcaggccgctgtcttgcacggcaatgcgcaggcgtggcttggtgctgcggtcgtccagggccaccacgatcagcacttcgccttcgtcggtcttttgcagggcgttttccagcagactcaacatggcctggcgcaggcgcgtcgggtcgccgctgatcacgcggggcacctggggctggataaagctgatcagttcgacgttctgctgctcggccttggcgcggaagatactcaggcagtcttcgatcagcgcattgaggtcgaactgcacatcgtccagttcgatctggccggattcgagcttggagatatcgaggatttcattgatcagcgtgagcagttcgttgccggcgctgtggatggtttgcacgtagtcgcgctgcttcaccgacagtggcgtacccagcagcagttcggtcatgcccaacacaccgttcatgggggtgcggatttcgtggctgatcttggccaggaactcggccttggccgcgatttcggcattgctcgccgccaggtcgcggctgaggctgaaacgcgcctcgacaatcgcacgctggcgttcgcccaacgccaggctcatcagcaggccgctgaggcagataaacgccagcagcgtgacgatcaggccctggggcgagaccatcgtcaggcccagcaacgccggcaggatgatcagcgtaccgatgttgaacaccaccatcgccgccacgaacaggcgtgccgggcggtagcctttctgccagtgataggctgagacaaacagcatgctcaagccggcgagggccaccagggcgtaggtgatgatgttcagcggcagggtgttgacgaacaacagcaacaggccgcacagcacgatgaacaggatgtccgccatcaacagcttgttcagcgggtgcgggcccaggggcatgaagaaacggtaggcaaacatcaaaccgcagggtgcggtgagcagcagcgccaggtaggcgcctggtgtctggattgcatgccagttcggcagccatggccctaccaggttgagcagcagcgccaggctgagcatcagcagcacttcgcacgccgccagccacaggctgctgcgcgagcggtggtaggcgaagcgcgtcaggttgtgcaggatcagcatcagcaggcagccgaacagcaggccgtagatcagcgtctgggtctggtcggcggcggcgagtacggctggttccagggtgatgtaggggcgcagttcgtgttccgagaccaggcgcaggtaaacctcgaggggcttctggctctggggcagcggcagcatgaagtcactgctgggcaacggtcgttcagcctggggctggcgtgtgccggtgctctgttgttccaccagggtgtcgccgtccagcacgtagaggctcaggtgcgacaggtccggggcgaatacccgcagcacttgttcgtgcttgccgggttgcagcttgaaacgtacccacaacgcaccgtccggttccgcggcggtaatgcggtccagttcgatggggctgaattggttggtgtagcgcgaggaacggatgtcgctcagctgcaggtcggcctgttcatcaagcaatactgcccagccactgccttgcgcggcggcctgggccgggaacaagcagagcagtgtcagcagactgacagtgaaacctatggcgatcctgagccagcgcacggcgaaatcccttcgtaggttgatgcacggttaactatgcgcgggtaggcctgcatacggcaagggccagaggcccctgcctagccgaacggatagctgcttactggttctcgccacgctcccgcgcaatggcgcgatagccgatgtccttgcggtagaaacagcctttccagtcgatcttcgcggccagcttgtaagcctgttgctgcgcggcgtcgacgctggcgcccatggcggtggcgcatagcacacggccaccggccgttacgacctggccatccttgagcgcggtgcccgcatggaacaccttgccttccagcgtagcagccgcgtccaggccttcaatcacatcgcccttggcgtagtcggcagggtaaccaccggccgccagcacaatgccgacgctcggacgtgggtcccactgcgcttcaaccttgtccagggcctgggccaatgcggcttccaccaacagcaccaggctcgattgcagacgcagcatcaccggttgggtttccgggtcgccgaagcggcagttgaactcgatgactttggggttaccggctttgtcgatcatcaggccggcatacaggaaaccggtgtacacattgccttcgtcggccatgccgcgcacggtcggccagatcaccaggtccatgacgcgctggtgcacgtcggccgtgaccaccggggcaggggagtaggcgcccatgccaccggtgttcgggccggtgtcgccgtcgccgacgcgcttgtggtcctggctggtggccatcggcaagacgttcttgccgtcgaccatcacgatgaagctggcttcttcgccgtcgaggaactcctcgatgaccacgcgggagccggcatcaccgaacgcgttgccggcgagcatatcgcgcacggcgtcttcggcttcctgcagggtcatcgccacgatcacgcctttaccagcagccaggccatcggccttgatcacgattggcgcacctttttcacgcaggtaagccagggctggctcgatctcggtgaagttctggtagtcggcagtcgggatcttgtggcgggccaggaaatccttggtgaaggccttggagccttccaactgggccgcaccggcggtagggccgaagcaatccaggccacggctgcggaacaggtccacgacacccgccaccagcggcacttccgggccgacgatagtcagggacacattcttttcagcgaagtcggccagttgctcaagggccagcacgtcgatagcaacgttttcgcacttggcttcaatggcggtgccggcgttgccgggggcaacgaagactttctggacgcgtgggtcctgggcaactttccaggccagggcgtgttcacggccaccgctgccaatgatcaaaacattcatttcaaaaacctcggatgacgcaaattcttgggaacactgtgggcgcttttctgtgggagctggcttgcctgcgatgcgggcgcctcggtgtaacaagtgcaccgaggtgatgctatcgcaggcaagccagctcctacagaagccagtgcccaccaggcaatgttggatcagtggcggaagtggcgcatgccggtgaagaccatggcaatgccggcctcgtcagcggcggcgatcacttcggcatcgcgcatcgaaccacccggttggattacggcggtcacaccggctttcgcggcattgtccaggccgtcacggaacgggaagaacgcatcggaagccattaccgaacccaccacctgcaaaccggcgtgctcagccttgatcgcggcgatacgcgccgagttcacccggctcatctggccagcgccgacaccgatggtctggcggttcttggcgtagacgatggcgttggatttaacgtacttggccaccttccaggcgaagatcaggtcgttgatctcttgctcggtcggcgcgcgcttggtcaccactttcaggtcggcgctgccgatcatgccgatgtcacggctctgtaccagcaagccaccgttgacgcgcttgtagtcccaggccgccgcgcggtcagccgaccactcgccgcaggccagcaggcgcacgttggctttggcggcgacgatggcgcgggcttcttcgctgacgcttggggcgatgatcacttcaacgaactgacgctcgacgatcgctttagcggtctcggcatccagttcgcggttgaaggcaatgatgccgccgaaggccgattcggtatcggtagcgtaggccagttcgtacgcctggcggataccgccttcagcgtccgggctcacggccacgccgcacgggttggcgtgcttgacgatcacacaggctggcttgacgaagctcttcacacattccagcgcggcgtcggtgtcggctacgttgttgtaggacagctctttgccttgcagttgggtcgcggtggcgatgcccacttcggcaggcttggcctccacgtagaacgccgcgctctgatgcgggttctcgccgtagcgcatctcctgggccttgatgaactggctgttgaaggtgcgtgggaactggctgcgaccttctgtgcttagggtttcagcggtctggttcacggtgcccatgtagttggcgatcatgccgtcgtaggcggcggtgtgttcgaacgccttgagcatcaggtcgaaacgctgggcgtaggtcaggccaccggccttcaggctttccaatacgttggcgtaatcactggcgttgaccacgatggccacgtctttgtggttcttggccgccgaacgcaccatggttgggccgccgatatcgatgttttcgatggcggtcggcaggtcgcagcctggcttgttgatggtggcttcgaacgggtagaggttaacggccaccagatcgatcggcttgataccgtgctcggccatgatcgcgtcatcggtgccacgacggccgaggatgccaccatggatcttcgggtgcagggtcttgacccgaccgtccatcatttctgcgaagccggtgtagtccgccacttccactgcggccacgccgttgtcctgcagcagtttgaaggtcccgcccgtggagaggatttccacgcccagagcttccagctcccgggcaaattcgaggatcccggtcttgtcggagacactgatcaaggcgcggcggatcggcaggcgggtagtctggtcggtcatttcaatttccatcaaaagcaaaggagtcagcaaaaaaggcgaccggttttacgcgggcgcctttctggtttgattgaatgcttacagcaaatcgtattgcttgagctttttgcgcaaggtgccacggttgaggcccagcagctcactggctttggtctggttgcccttgacgtagttcatcacgctttcgagcaagggcgcctcgacttcggagagcaccaggttgtacacgtccgtgacggaagcgccctcaaggtgggcgaaataattgtgcagcgccttctcgacactcccgcgaagggtctggccttcttcgctcggcgtgttgaggtgctgtttcaaattgacgttgtcgctcacgggtgttgttccactcactaaagtctcggtcatcatcgtcatgcggccaccccctctccgtcccctgtccccaggctcttgtaacgctcgctgaagaactcacgaacgttggcgcattgtgcttccgtatcatccaaacgattgaagtgggcgcgaaactccctggcgcccggcagggttgcgagataccagccgacatgcttgcgagcaatgcgtactcccatcacatctccatagaaggcgtgcagggcggccagatgctctagcagaatacgttccacctcgattagctccggtgccggcaacacttcaccggtacgcagaaaatgctcgatctcacgaaaaatccacggacgcccctgggcggcccggccaatcaacaagccatcggcaccggtggcgtgcagcacgcgccgggccttctcggcggagtcgatgtcgccattggcgaataccggcatcgataccgcctgcttgatcgcagcgatggtgtcgtactcggcttcaccggtgtaaaggtcggcgcgggtgcggccatgcaccgccagcgctgtaatgcctgcctgttcagcgatcttcgccactgtcaggccgttcttgttgtcccggtcccaaccggtacgaatcttcagggtgaccggcacatccactgcggcgacaacggcctgcaggatctcggctaccaactgctcatctttcaacagggcggaaccggcggccttgttgcagaccttcttggccgggcagcccatgttgatgtcgatgatctgcgcccccaactccacgttggcccgggccgcatccgccagcatctgtgcatcgccaccggcgatctgtaccgagcgcggctcgggatcaccttcgtggatcatgcgcatccgcgatttgcgggtgttccacaagctcatgtcgctggtgaccatttccgagactactagacccgcgcccaaacgcttgcacagctgacgaaagggctggtcggtgacgcccgccatcggggcgaggatcaagccgttctgcaatgtgtatgggccgatgcgtaccgccgacataggacttccctgttgtggggccggatcattagagttcgaaaaagggttggcatgatacccgctctcgatgactggataaaggctgaattggataaaatctgaacagttatttctttatcgccagcggtttggttgcgcaggggaaagtcaataacctgccgtcaaacctcaatgcatgaaccgattcactcgggcgagtggaagctcaggctgtaattcacggctttgttgcccggatcgaggatatccagggagatatggatcggggtttgtgatggcatttcgctaacgccggccaactcaccgctgaggtattcggcgggtttgaagcgacggctggcaatcaggttgccgttcaggtcggcaaaacgcagctccagcagcgggaagggctgggagaaggttgcacggttatagatgatcgcatccaccaccagcgccccggcgaaatcggggtggctgcgcaccaccaggttactgctcttgatatgggcgatatcgacccgcgacggcactgtgcaacccagggtggggcacagttgctggaaccacgggcgatacgcgtcctggcgggccaggtcgtcgaattggtaggcgatgtattggcctgcgaggccggcggcggcgatcaggaccagcagcagccagaccaggcgacggcccaggcccgtcgggcgtttgtgtgcgtagaggtgcagcggatcgtcttccaggtcctggagcaaatcgtcatgggcgctggtttcagcgcgtgggcgcttgcggcggggtggcaggcgatcttcggggtcggccgctttggtcagcggcgtgaacggtgggtcgatgtcgtcatcgtctggtgttgagcgcaggggtggctcatcgtcgagatcgtcggtgtggagcgacatggacggttcggtgcgctgcctggtcgcaggttctggctcgttttcgctgtcgtggaggcgctcttcaggcggctcgctgaacaggcttgccgcccatttctcttcttcggccttgacgctgtcgcggctggcgctgagaggctcgtccttttgtcgacgatcggcgcccgcatgccggcgttctgcgcccgggggcagggtgtgctgaatctcgcggcgttccagcttggccagttcttcgtccaggtccaggttgtccaggtccagctcttcggcggtccactgtttctggctgatggcgcgcggcgcctcggcagtggtctcgggctgcggcgccggcgcctggccgcgttgctccaacagctggcgggccgcattgaacacttgcaggcacgagccgcagcgcaccacgccacgggccacgctcaattgagcgtggctgacgcgaaagcgtgcttggcaatgcgggcactgggtgacgaaactgtcggtcatgcggccatccgattcaggcaagcgctcattctagcgccgacgaccgctgatgcgtacccagccatcgcggttggcgatcggatccagctcgaaatccttggcgtaggcggcggcgacgtcttcgccctgctcggccaggatgcccgacagcgccaggcggccgcccggcctgaccaggctcgacagttgcggcgccagcgccaccagcggcccggcgaggatgttggccaccagcacgtcggcctgtacctggggcagttgctccggcaggtagagtgggaatttgccttcaggaatgttgttgcgcccagcgttgtcgcgggaggcttccagggcttgcacgtcgatgtcggtgcccacggcttccttggcgccgagcagcagggcggcaatcgccaggatccccgagccgcaaccgaagtccagcacgtggctgtcggtcaggtcctggccgtccagccattccaggcacagcgcggtggtcgggtgggtgccggtgccgaatgccaggcccgggtccagcagcaggttgactgcgtcgggctcgggcgcggcatgccagctcggtacgatccacaggcgctggccgaaacgcatcggctggaagttgtccatccagctgcgttcccagtcctggtcttcgatgacttcgctgtggtgctctggcagcgggccgccggtgagcagttccatatgggccagcacggcgttggcgtcggtgccgtcttcgaacagggccagcaggtgggtgtgggaccacagcggcgtggtgttgagttcgggctcgaagatcggttggtcttcggcgtccatgaatgttacggagacagcgcctacttcgaggaaagcgtcttcataggtttcggcttgttctgggctgatggcgagacggacttgcagccaaggcatggcgggcacctttgaaaaaatgagtgtgcagcggggtggggctgcgaaagggcgcaagtttacgcgagcgcacagaagaagacgacatacaccgatcaaatgtgggagggggcttgccctcgatggcgatggatcagacacagctgcatcaactgacactccctcatcgggggcaagccccctcccacattggaccctgtacatccagaaattccagggcccagacacaacaaagccgcccggaggcggctgtgttgtttggagcacttactggttggccagcttgtgttccaggtagtgaatgttcacaccaccttcgcagaagccttcatcacgtaccagttcccgatgcagcgggacattggtcttgatgccatccaccacgatttcatccagggcgttgcgcatgcgggccatggcctcatcgcgggtggcgccccaggtgatcagcttgccgatcaacgagtcgtagttggacggaaccttgtagccgctgtacaggtgcgaatcgacgcgaacgccgttgccacctggagcatggaaatgcttgaccaggcctgggctcgggataaaggttttcgggtcttcggcgttgatccggcactccagggagtggccgtggatcttcacgtcgtcctgggtgaaggacagcacgttgcccgcggcgatgctcagcatctccttgacgatatcaataccggtgaccatctccgagaccgggtgctctacctgcacgcgagtgttcatctcgatgaagtagaaacgaccgttttcgtacaggaactcgaaagtacccgcgccacggtagttgatatcgatgcacgccttgacgcagcgcgccaatacttcctggcgggctttttcgtccaggcccggtgccggggcttcttccagtaccttctggtggcgacgttgcagcgagcaatcgcggtcacccaggtgaatggcgtggccctgtccgtcggacagtacctggacttccacgtgacgtgggttggtcaggtacttttccaggtagaccatcgggttgttgaaccaggcgcctgcttcggagcgggtctgcttggcggcttcgatcaggtcttcttccttgtgcaccacgcgcatgccgcgaccaccaccgccaccggcggccttgatgatcaccgggtagccgacttcgcgaccaatgcgcagagcggtttcctcgtcttcaggcagcgggccgtcggaacctggaacggttggcacgccggcagcgatcatggcttccttggcagagaccttgtcgcccatcaggcgaatggtctcggctttcgggccaatgaaggtaaaaccggatttttccacctggtcgacaaagtcggcgttttccgcgaggaaaccgtagcctgggtggatggcggttgcgcctgtcacttctgctgcagcgatgatgcttgagactttcaggtacgagcttgtagccactggcgggccgatgcagatgctttcgtccgccagtttcacgtgcatcaattcagtatcggccgtcgagtaaacagcgacggtcttgatgccttgttccttacaggcgcgcaggattcgcagggcgatctcaccgcggttggcgatcaggactttttccagtttcttcgcaggtttcaacatcgaaggcactccgcggttcaaacgatggtgaacagcggctggtcgtactcaaccggctgaccgttttctaccaggatggattcgatgacgccggctttttcagcggtgatgtggttcatcatcttcatcgcttcaacgatgcagatggtgtcgcccactttcacggtagcgccgacttcaacgaaggctggcgaagtcggtgccggggtgcggtagaacgtaccgaccattggcgacttgaccacgaagccgttcagcgccggagcggctggggcggcaggtgcagcggcagcagcaggcgcggcggccggagcagcagcggccggagccggcgcttgcatctgtggcgcgtagaactgttgggccggggtcttgctgtggcggctgatccgtacggactcttcgccttccttgatttccagctcgtcgataccggattcttccagcagttcgatcagtttcttaactttacggatatccatgaatcatcaactcccaagggtcggtcaggggcgcttggccggttgttcaagttgttccagggcggcctccagggccagtcggtacccgctggcgccaaggccgcagatcacacctaccgctacatcggagaagtaggagtgatggcggaaagcttcgcgtttgtgcacgttcgacaaatgcacttcgatgaatgggatgctcaccgccagcagcgcgtcacgtaatgcaacacttgtatgcgtaaaagcggcgggattgatcaggataaagtccacgccttcgccgcgcgcggcatggatgcgatcaatcaattcgtactcggcattgctttgcaggtagagcagatggtggccggcttcacgcgccctgcgttcgagatcaaggttgatctgctccagggtgactgccccgtagacgcccggttcacgggtgccgagcaggttcaggttgggtccgtgaagaaccagtaaggtcgccatcggctgttccttgttattgatgtgggtacggcagaacccggcgactatgccgcaaagcctttgtgactgtccagttctatgcagtaggcggcacgattagcgaggatagcgcgaaaattgtgactgtggggctggattcggtcattggcaacaccgtctcgaatcctgtggagatcgtgtcagacgcggaaggcttgaacggcagtgttgagctgcccacccagcaccaacaactgctcaccctgtcgtcggccctgtccgattcgcagcaaattatcctcacccaactgatgaatccgctcactgttgtcgcgaatctcactgacggcaccactctgctgcgcggtcacatcggcgatgcgcacggcggtctcggagatggtctggatcgcgccgacgatttcatccagcgcaccgtccgctgcctgggcttgctgggcggtggcttcggcgtgttcgacctgggcgcgcatgccttgcaccgattggtgggcggcgctttgcagcccggcgatcaaggtctggatttcggcggtggcgccagcggtgcgttgggccagcgagcgcacctcgtcggccaccacggcaaaaccgcgtccggcttcaccggcacgggcggcctcgatggcggcgttgagggccagcaggttggtctggtcggcaatcgagcggatcaccgtgagtaccccgccgatggtggcagattcctcagcgagtttttcgatcatctgcgcgttttgctgcacttcgcccaccagggcatgcagcccggtcaggctcaggccgatcacgcgctggccttgctccaccgcctggccggcgctgcgactggcaccggcagcctggctggcgtcgccggcgacttgctggatcgtcgcttccagttcgcccagcgaatcacggatctgcgcggtatccccggcctggcgttcggcgccgtcgtgcaggccgctgctcagttcggcgagggtgcggctgctgccggcgacttcctcggcgttgccgcgaatggtgccgaccaaatccaccaggtaggcgcgcaggcggttcagagacgcttcgatatcgtgcagttcgcggttggtcttgcccagggcaatcggccggctgaagtcaccttcggcccaagtcgacagggctggcgccaggttggtcagcactcgcgccagcttgcgttgcagggtgtcgatcaatagcgcgatcaacaggatcaggccaatcatcagcccttgcatcaggcgcacttcgccctggatcttggcgtgttgcgcacgcacgaccggctccaggccggcgatggcttgttgcacggtgttgattttctggtgggttttggcggccaggtcggtgcgttgctggatctggtcgcgggtgcgcttgagttcggcggggtagcgggtcagcaggctgttgagttcacgcttgaggtcgacgccggtgtcttgggcttcagttttttcgctgttctccaggcccatcagcgcagaaaaatcatcggcgctggactcggcgctggccttcacgccgagcaacggcagttgctccagcaggtcggcctggctgcgaatgttgccgacttcgcgttccacatcgtcggccagttccgcacgcccgctgctcaccagtttgtcgcgggccagcgacaacttgcccagatgctgggaggcggccagcaacggcggcagatagcgggcggcttcgggagaactcacgccgatggcgtactggctcagttgctccaggttggcgcccaattcacgttcggcttgcagcagcaaggcttgcgggtcgcctgccagcttgccggccgccagcaagtcggtcttgctgaacgcatccaggtccaccaggcttgggcgcaggttctgcgccaggtccgccggcagttcatccagatgctgtaccaggctttccaggctctggcccgcgctgctcaagcgcagggcgtcgccgctggccaggtagtcgtcgatattgcgcgcggcttcgttctggaaactctgcgacaggcccaggtagcgctccatcagcaaatagggccgctccagcgcccgttgcgaccaccacaacgtcgcccccagcgccaggcacacggccaccagaagaagggtattgagattggtcagcagcttcaggcgcatgcgtggtttcaaccgacagcaaaagataagtgcctgaagttattgcgtttccgttacaaagttatgacggaatcagtggattccggtgaaaagatggcactttgctttgatgtgcgtgcggcttgcacacgattgcgcccagcgtccttggcacggtacagcgcctcgtcggcctgggcggccatcatcaggctatcggagccgtcgcacagctccaccagtcctgcgctgaaggtgcaccacaaatcctggggttgcgccgggtagtggatctcggcaaagcgcccacggatttcatccagcactctgcaggccgattccagatcggtgtcgggcatcacgatggcgaattcctcaccaccatagcgcccgatgtagtcggtcttgcgcaggcgctgcttgagaaacagcgccagactcttgatcacgcggtcgcccatggggtggccgtggctgtcattgacccgcttgaagtggtcgatgtcgagcatggcaaagctcaatggcttgttctcgcggcgcgcgcggaagctgcagtcttcgagcaattgcaggatgtgggtgtggttgtacaggccggtcaggctgtcgcgtaccatccgcgccttgaggttgcgcgcccgcgccgcgcggttgcgcacggtggtgatcaggtggcgcggcttgatcggcttggtgaggaagtcgtcaccgccttcgctcatggcgtccagttgcttatccaggtcgtcttcggccgacaggtagatgatcggcacgctgacgtaacggtcgttatggcggatgaccttggccagttcggtgccggtacaggcgggcatgtacatgtcgaggatgatcaggtcgggctggaagtccgccagctcggccatggcctggatcggctcgatcaaggtgcgagtgacgatgccggcactgttgagcaggcgctcggtgtgcagtgcctgggcccgcgaatcgtcgatgatcagcactttatacggttcgtactgggcaacgcaggtcagtacttcgatcttttccagcaggctggaagcttccagcgtaccggtgaggaattcctggcccccggcgcgcacggcggccaggcgggtcggggtgtcggtttcgtgcaggctgaagaacagcagcggcagcttctgttccaggccttcctgggcttcggcggcgagcttgaggcccaggccggcaccgcagaaatccacgtccatcacaatcgccgaaggcaggcgctcggccatcgacgcacgaaacgccgccacgctgtccagggattgggcgctcatgccaaagaactccaactgcttggccaggcgctcggcacggtcgtgatcggccagcatcacgtagatcggcttgcgcatcggcggcaggaaggtttgctcaagctggtcgccctggcgcaggccggtacgggacaggcgctgcatcaggcggttgagttcggtgatcagttggctgctcaggcgcccgcggttttcgttcacggccttgagagactcgccgatgtggtgcgcgagctggctgtgttccggctgttcgaaacgctcggcaaagcgcagcaggcgcagattggcctcgctgagttcggaaaggtcggtgccggaccactcgctgcgttgcaggcgctgccagatctcaagaatttgacgtgcctgatgaattacccgctgggcaaaatgctgcttgaggcgctcacggctggggtcttctggctcggtcatatcctgactactagtgagggtgcatgctgaggtcgactgatggctctatgctagcacctctttcccatgggatgagtgtcatacgtcaataaactgtgcgtgcggagtattcagttgctgacccgctggtcgctcggcgtaaaaagcgtgcatcctttatagtccaacaccctctgtgcgccagtttggcgaaaagccccgcacgggcgggcacgatggggtagggttgtggtcggagtgtttgaacgcacgccatcaattcaagtgcatgaactcaagtgattgaaaggatatcgccatgctggactggaaaaaccgtgcaggcagtgccaaaggccccgcccctgagcccaagtcggccaaccgcagctattttcgtaccttgctgatgagccgcgccgtgctcagcgtgctcggcctgtacctgttggtcacgggcgccctgggctggtactggagcgaagagccggcgctgttcccggtccagcagaatgcacagcttgccgccgaaaaagacggcaagcagatggtggtgggctttaccaccgtcgaaaccctcaagactgtggtcggtaccttgctgaacaagccgggtggctacatttccaacgaccgcttcccgcctggcctgtggatggacaacatgccgagctgggaatacggcgtgctggtgcaggtacgtgacctgacccgcgccctgcgcaaagactttgcccgctcccaatcgcaatcggccgaggatgcggatctggccaaggccgagccgcgcttcaacttcgacaacaagagctgggtgctgccgtccagcgaatcggaataccaggaaggcatcaattccctgagccgctatgaggcgcgcctgtccgacccgaaccagaagggcgcgctgttctatgcgcgggccgacaacctgaacaactggctgggcgacgtcgccacccgcctgggctcgctgtctcagcgcctgtcggccagtgtgggtcgcgtgaaactgaacaccgcgctgaaaaccgaagcgctggcgccgggtgaagtgccgcaggtcgatgaagaagtggtggaaaccccatggatgcagatcgacaacgtgttctacgaagcccgtggccaggcctgggccctgtcccacctgttgcgcgccatcgaagtggactttgccgacgtcctggccaagaagaacgccaccgtcagcgtgcgccagatcattcgtgagctggaagcctcgcaggaaccggtgtggagtcctatgattcttaacggcagtggcttcggtgtactggcgaaccattcgctggtgatggccaactatatttcccgggcaaacgctgcagtgatcgacttgcgtcagctcctcaaccagggttgatgatggacgctactcaaaaggaggccgcccaccgcgcggcttccgatgccgaactgatctgctgggtcgatgagcaggacactctgctcggcagtcttgtcagggccgatctgcgccagcgcgggttgatcggccgttgcacctttatcttcctgttcaattcggccggtgagctgtgtgtgcaccggcgcaccctgagcaaagccatgtaccccggtttctgggacacggcggcgggcgggatggtggctgcgggcgaatcctacgccgtgtcggcggctcgcgagctggaagaagaactgggcgtcggcggggtggaactggtcgaacatgaccatttctatttcgaagatggcgatagccggctctggtgcaaatcctactccgccatctgggacgggccactgcgcctgcagccggaggaggtgatggaagcgcgctttttacctatcgacaccgtcctgcaggaggctgagcaaaagccctactgcccagacgcccaggaaggcttgcgccgctatctggccttacgtcgctaaagttgcataaattggcgccatttggctcttagcaagtcggctttttgtggttacactgcgcgacttttcacccgaaccgccttggcggttcggtagcgctgcccctgcctgagtggggcttcgcggtcggtcatcctgatcgatcagtcttcatcctcccaagaggattgccggtggccaaaaaagccgcatccttcgccgcccttggtggcctggtattttccaccgacgcaggtcgacactgcccggactgtcgtcagcccgtggattcgtgtacctgcaaacagaccctgatccccgaaggcgacggtattgcccgcgtgcgccgcgagagcaaaggccgtggcggcaagacggtgaccaccatcaccggtgtgccgctggccgaagatgcgctgaaggaactcgccaccacgctgaaaaagcgttgtggcaccggtggcgcgttgaaagacggtgtcatcgagatccagggcgatcacgtcgagttgctgttggccgagctgatcaagctcgggtacaaggccaagaagtccggcggctgaaagcctcttcccgacctgtgtctaaactctgtcctgcgcgtggggtcctaccttgcacgcaggcaaatcgtcattttcattctttagactgcgccagcctcaaccaggggcggcgctttcgccttcatttataggggacttcgatgtccgtacgacgcacacgcaaagacgatggcagccaatggacagttgcggacagccgcagtgtttacgggattcgccattggggggccgggtatttcgcgatcaatgaagccggtcgcgtagaagtccgtccgaacggcccgaacagcacgcctgtcgacctgtacgagcaagtcgacgaactgcgcaagagcggcctgtcgttgccgctgctggtgcgcttccccgacatcctgcaagaccgtgtacgccaactgaccggtgctttcgattcgaacatcgagcgcctggaataccagagcaagtacaccgcgctgtacccgatcaaggtgaaccagcaggaagcggtgatcgaaaacatcattgccacccagaacgtgtccatcggcctggaagccggctccaagcccgagctgctggcggtattggccctggcgccgaagggcggcaccatcgtctgcaacggttacaaggaccgtgagttcatccgcctcgcgctgatgggccagaagctcggccacaacgtgttcatcgtgatcgagaaagaatccgaagttgagctggtgatcgaagaggccgccagcctcaaggtcaagccacaggttggcctgcgtgtgcgtttgtcgtcgctggcgtcgagcaagtgggcggacaccggtggcgagaaatccaaattcggtctgtcggcggcgcaactgctgtcggtggttgagcgcttccgtgcggccggcctggaccagggcatccgcctgctgcacttccacatgggctcgcagatcgccaacctggccgactaccagcacggtttcaaggaagccattcgttactacggcgaactgcgcaacctcggcctgccggtggaccacatcgacgtcggtggcggcctgggcgtggactacgacgggacgcactcgcgtaacgccagctccatcaactacgacatggatgactacgccggcgtggtcgtgggcatgctcaaggagttctgcgacgcgcagagcctgccgcacccgaacatcttttccgaaagcggccgttccctgaccgcccaccacgccatgctggtggtgcaggtcaccgacgtcgagaaacacaacgacgaaatcccgaccatcgaaaacaaggaagccctgccggaaaccgtgcagtggctggtggacctgctcggcccgaccgacatcgagatggtcaccgaaacctactggcgcgccacccactacatgagtgacgtggccacccagtatgccgacggcaaactgaccctggccgaaaaagccctggccgagcagtgctacttcgccgtatgccgccgcctgcacaactcgctcaaggcccgccagcgctcgcaccgccaggtgctggacgaactcaacgacaagctggccgacaagtacatctgcaacttctcggtgttccagagcctgccggacacctgggccatcggccaggtattgccgatcctgccgctgcaccgcctcgacgaagagccgctgcgccgcgccgtactgcaagacttgacctgcgactccgacggcaagatcaagcagtacgtcgacgagcagagcatcgagaccagcctgccggtgcacggcttgaacgaaggtgaagactacttgctggggatcttcctggtgggcgcctatcaagagattctcggtgatatgcacaacctgttcggtgataccgattcggtgaacatctaccagcgtgaagacggttcggtgtacagcgccggtatcgagacccacgacaccatcgaagacatgctgcgctacgtgcacttgtcgccggaggagttgatgacgcactaccgtgacaagtgtgcgagcgcgaagatcagcgccagtgagcgtacgcagttcctggatgcgttgcgcctgggcttgacccggtcttcctacctgtcctcgtaaaaaatgtgggagggggcttgcccccgatagcggtacatcagcaacacttaagttgcctgatccaccgccatcgggggcaagccccctcccacatttgacgcagtgctgatcctgaaattgtctgagggctgagcaatgttgagcaaatggccgcaagtgttcaccctggcagtggccgcattcttggccgcctgctcccccatcaaagtcctcaacgccctcaccccttccagcaccttcaccaagaccgcggccatcgcctacggcgctgatccgcgccagaaactcgatatctaccgtcccgctcccgccatcgccaacgcgcccgtcgttgtgtttttctacggtggcagctggaacagcggctccagggacgactacggtttcgtcggcgaagccctggcgtcacgcggtattgtcgtggtgattgccgactaccggctttatccccaagtgcgttaccccgcgtttctccaggatggcgctcaagcggtggcctggacccaccagcacatcgccgaatacggcgctgacccgcagcggctctatgtgatgggccacagctccggcgcctataacgcgtcgatgttggcgctggatgcgcgctggttgaatgcggtgggcttatcgcctgccattttcaaaggctggatcggactggccgggccgtatgattttctgcccattgaaaataaggacgtacggccggtgttcttcttccctgactcgccgcctgagtctcagccgatcaaccacgtcagtgccgatgcgccgccgagcctggtaatggcgtcaacggacgacaatctggtcaaccccacgcgcaatactggcggcttggctaataagttgcgcgcggccggcgtgccggtagaagcgttttacttctccaggaccaaccaccagacgctggtggcctccctgtccaggccgttgcgttggttggcgccggtgctggataaggtcacggcgtttatccaagccactgatcctgccggttcaagcgccaggcaatcgcccacaaagtaaggctgcgcagggccatgaacagcaggaagcttatccacaacccgtggttgccgaacccctgcaacgcccaggcaaatggcagcaggatcaccacggtcagcaacatgccattgcgcatttcccgtgcacgggtggcgccgatgaacagcccgtccagcaggtagctccacaccgcaatcaagggcaacacggccaggtagggcaggtagatatcggcggtctcgcgcacgctggggatatcggtctgcatggcaataaacaaatggccggcgaaggtgaacaacagggcaaagccgacgctggcaatcaacgaccaaccgcaagcgaccactaatgaacggcgcaaggcctggcggtcatgggcgccgatggcgtggccgcacaaggcttccaccgcatgggccaagccgtccagcgcatgggccgtcagcaacaggccgttgagcagcagtgcattagccgccacggtggcgtcgcccaggcgtgcgccttgcaccgtgatcatgaaaaacaccgattgcagcgcaaggctgcggatgaagatgtcgcggttcaccgccagcaacgggcgccagctctcccatagtttcagtgctgcccaggcgatatggccggggtaggcgcgcagggctttttgcgtcatcgccaggcccagcaaggcgccggtccattcggcgataacggacgcccgcgctgagccgaccaccccccaatccagacccagcacaaaccacaggttcagggcgatgttgaccagattggtggtcagcaggatcgccaacggcgcacgggcgttctgcgtgccgaggaaccagcccaccagtgcatagctggcaagggcggcaggcaggccgaacaggcgcgtgtggaagaagtcccgggtcagttgattgagttcgggtgagggttgcatccattccaatgccagatgactcagcggaatacccacggtgcccagcagcatggctaaccccagcgccagcagcaggccttgcaggaggatttgtcgcaacgcggccccatcattgcgcccggcagcttgtgctgcaaaaccggtggagcccatgcgcaggaaacccatggcccaggccaggaaggtatacaggctggccccgaccgccacggcgcccagttgatgggcgtggggcaggtggccgatgaccatgctgtcgaccagggccacaaggggcaccgagatattcgacaggatcatcggcgcggccagggcccagacgcggcggtgggtggggcggtggcgccagtcgatgagtagggtgggcatgggggctccttgggggagcggcattgtaacgggccctttatctcactgcagaaccaatgtgggagggggcaagctccctcccacctttggatctccagtgtttgtgggatttggctcgacattgcgtcccatcaagaaccaaagcaccctccgtcggtcaatgtgaccagcaccacatcggccccgtgcgggctgatatatagttcacccttcggacccctctcacaacgagtgccccatgtttaacaaaggattgttcctggcctgtgcgctggccctgctgagcgcctgcgattcctccgataaaccggcagccccgactgctccagccgcggcgacgattgcaccccagccggccaaggcggcggtcgacgtggcggcgctgaagcagcgctatgccgggcgtgagttgagtgtggtggacgtgtccgaagtgcagctcgatggggccagcaccctgtccgtgagcttttccattccgctggaccccgatcagaagttcgccgacaaactccacctggtggacagcaaatccggcaaggtcgatggcgcctgggaaatctccgacaacctgatggaactgcgcctgcgtcacctggagccgcagcgcaaattggtgctcaccgtcgatgccgggctgaaggcggtcaacggcaacacgctcgccaccgagtacggcgcccgcctggaaacccgcgacctgcaagccaccgtcggcttcgccagccgtggcaccttgctgccgacgcgcctggccgaagggttgccggtgatcgcgctgaacgtcgacaagatcgacgtcgaattcttccgcatcaagcccgaatccttgccgaccttcctcgcgcagtgggggcgcaacaccagcctgcagagttatgaatcccgcgaactgctgccgctggccgacctggtctacggcggtcgcttcgacctgaacccggcgcgcaacacccgcgaaaccctgttgctgccgatcgccggcctcaagcagttgcagcagccgggtgtgtacctggcggtaatgcgcgcctccggcacttataactattcccagccggccacgctattcaccttgagtgatatcggcctgtcggtgcaccgctacgccaatcgcctggatgtgtttacgcaggcgttggaaggcggcaaggcactggacggcgtcgaccttgaagtgctcgacgccgagggccgtgtggtcggccagggcaagaccgaaaagggcggccacgccgagttgccgttgccgaaaaaggcccaggtgttgctggccaagcagggcgagcagaccagcatgctgcgtctggacagcgccgcattggacctggccgagttcgacatcggcggtcagccttcccaccccttgcagttctttgtcttcggtccgcgtgacctgtatcgccccggcgaaaccgtgctgctcaacgccctgctgcgcgacaaggatggcaatgccgtcaaaccgcagccggtgagtgttgaagtgcgccgcccggatgaacaggtgagtcgcaaattcgtgtgggatgccgacgcctccggcctctatcaatatcaactgcaattggccggcgaagccccaaccgggcgctggcagctggtgttcgacctgggcgatggcaagccgcaactgtatgaattcctcgtcgaagacttcctgcccgagcgcctggcgctggaactcaagggcagcgataccccattgaacccggcggataacccggtgattcaagtgaccggacgctacctctatggtgcgccggcatcgggcaaccgggtcagtggacagatttatgtgcggccgttgcgcgaagcggtcaagtcgctgccgggctatcagttcggctccgtcactgaagaagagctgagccaggatttcgaactggacgaaagcgtgctcgacgccaagggccaggaagcgttgaccctggaaagcaaatgggccgaggctaagtcgccgctgcaactgatcgtgcaggccagcctgcacgagtcgggcgggcgaccgatcacccggcgcctggtgcagcctatctggccggccgagcaactgccgggcctgcgcggcttgtttgacggcaaggaaaccaacggcgatggcccggcggaattcgaagtgctgctggccaaccaggacgggcagaaactcgccgcgccaaacctcaaggtgcgcctggtgcgcgagcgccgcgactactactggaactactccgagagcgatggctggagctaccacttcaacgagaaattcctcaacctcgacgaacagaccctgaacatcaaggccggcgacacggccaaggtcagcttccagctggagtggggcccgtaccgcgtcgaggtggaagacccgcagaccggcctggtcagcagcctgcgcttctgggccggctaccaggcccaggacaacactgaaggcggcgccgtgcgccccgatcaggtcaagctggcgctggacaaaccggcgtatggcgacggcgataccgccaatgtcaccgtcaccccgcccgctgccggtaaaggctacctgctggtggagtccgccgaagggccgctgtggtggcaggaaatcgatgtaccggccgagggcaaaagctttgcggtgaaactcgacccgaaatggtcgcggcatgatttgtacgtcagtgccctggtgattcgcccgggcgagcgcaaagccaacatcacgcccaaacgtgccgtgggcctgctgcacctgccgttggatcgcacccagcgcaaactcggcgtgaccctcaccgcgccggaaaaaatgcgccccaaacagccgctgacggtgaaagtcgccgccaaaaacgccgatggcagtgtgccgaaacaggtgcatgtgctggtggctgcggtggacgtgggcatcttgaacattaccgaatacccgacgccggacccgtactccagcctgttcggccgcaaggcttacggcgtggaccagttcgatatctacggccagttgatcgaagccgggcaggggcgcttggccagcctggcattcggcggtgatgcggcgctggccaagggcggcaagcgcccggacaccagcgtgaccatcgttgccctgcaaagcgcgccggtgaccctgaacgagcagggcgagggcgaagtcagcgtcaatatccctgacttcaacggcgaactgcgcctgatggcccaggcctggaccgatgaccgctacggcatggccgaagccaagacggtgatcgccgcgccgttgattgccgagctgtcggcgccgcgcttcctggccggtggtgaccagaccacgttggcaatggacctgtccaacctgtcgggccaggcgcagaagctggatgtgcaactgagcgccgaagggcagttggagttggtcaacgctggcgcgcaaaccgtcgagttgaaacaaggccagcgcaccaccctgcgcatcccggtgaaagcctggggcggtctggggcagggcaaggtcaaggtcaccgtgaacgggctggacctgccgggtgaaaacctgccgccgttcacccgtgaatggacgttgggcgtacgcccggcgtacccggcactgctcaagcattaccgcgcggtgctcaaggatcagccgtggagcctgccggcggacacgctcgatcagttcgactcatcagggcgccaggcgctgttgagcctgtcgagccggccgccgcttaacctcggtgcgcagatcagtgcactcaaggcctacccttatggttgcctggagcagaccgcgagcggcctgtacccgtcgctgtatgccgacgatgcgctgctcaagcgcctgtcgatcaagggcgagtcggacagcgaacgtaaacgcaagatcgagctgggcatcgaacgcttgctaggcatgcagcgctacaacggcagcttcggtctgtggggcgccgatggcgaagaagaatactggctgacggcctacgtcaccgacttcctgttgcgtgcccgcgaccaaggctttgccgtaccgccgcaagccttgaagaaggccagcgagcgcctgctgcgttatgtgcaggaacgcaacctgatcgacgtcgactacagcgacaacgccgaccacacgcgcttcgccgtacaggcctacgccggcatggtgctggcgcgcagtcaacaggcgccattgggggcgctgcgcagtattttcgaacgacgcagcgatgcacgctccggcttgccgctggtgcagctggctatcgcactgcagaacatgggcgaccagccgcgtgccgaccaggccttgctcgcggggttggcgacgcagcgtaacgccaatgagtggctggccgactacggcagcccattgcgggaccaggcaatgatcctggccctgctggaagagaacgacctggccaagggcaagcgtgaggagcgcttgtttatcctctcggatcagttggcggccagcccgtacctgtcgacccaggagcgcaactcgctgttcctggccgggcgcctcgggtttgccaagccagaggcgaactggcaggtgtcgctgaccggcagtggcggcgtgcaggcattgagcaaccaacactcgacgctggaattggagggcaagctgctgtccagcgatctgaccttgagcaatcagggggacgcaccggtgtaccagcagctgacgatctcgggttatccacaggtgccaccggcagccggtggcgacaacctgagcatccgccgcgaatacctgggcatgaacggccagccgctgaacctgcgcaacctcaacagcggggagctggtactggtgcatctggcggtcagcgccaagcagcgtgtgccggatgccctggtggtggatttgctgccggccggcctggagctggaaaaccagaacctggcgcaaagcgccgccagcctggaaaacgccagcagccaggtgaaggaatggcgtgagtcgatgcagaacgcctcgctcaagcaccaggagttccgtgacgaccgctacgtggcggcgatcaacctggacggctccggcaccacacacctgctgtacttggcgcgggcggtgacgcccgggacttatcgtgtgccgccgccgcaggtggagtcgatgtaccggccaaattggcaggcggtgggggagacgccggcggatctggtgatcaagggacgttaatgtaaaacggggcctcaatgtgggagggggcttgcccccgatggcggtggatcagtcagcttatctgtagctgacccaccgctatcgggggcaagccccctcccacaggtgattttcggtgttttgggatcagtggacgacccagctcagaagccacaggcccagcagcagccagatgatgcccatgatgatcgacgcccgcatgaaggcgcgcaccgccgagtacagcagcatcaggccgacaatcagagtgaggatgctgatgatcgaggtgtccatgcccaaggtgcgggacaggccttcgacaaagttgccaccggcgtgggtcagcgcaccgaacaggccgctgagtccgtcgacgataaagcggatgatcgaaccgagcgcctggcccaaccattcgaaaaagctttctacctgcatgtgtgtgtcctgatgagaaggtgggcgtatctgtgcctttggttgttattgcaacaggctagttccctaccagcatagaggtttgcccgtttgagtttgcgtttagttgcccgctggaccctggccagccttttgttggtgatcgccctgctgtggctggccgatcgcatctggccgttgcccctgcccaaagatgacctggcgcgggtggtgctggccgaggatggcacgccgttgtggcggtttgccgatgccaacggtgtgtggcgctaccccgtgcagaccagcgaagtatctccgtattacctggatgcgctgctcacctatgaggaccgctggttctaccagcaccccggcgtgaatccgctggcactggtgcgggcgacgtggcagaacctgaccggtgcgcgggtggtgtcgggcggcagcaccttgtcgatgcaggtggcgcgcttgctggatccgcattcgcgcaccttccatggcaaattgcgccagttgtggcgcacggcacagctggaatggcacctgtccaaggaagaaatcctcaacctctacctgaatcgcgccccgtttggcggtacgttgcagggcgtggctgccgccagttgggcgtacctgggcaagtcgccgtcacagctgacccacgccgaagccgccttgctcgccgtgctgccccaggcgcccagccgcttgcgtccggaccgccacccccaacgcgcccaggacgcccgtgacaaagtgctgcgccgcctcgccgaattccatgtgtggccgcaagctgccgtcgatgaggccctggaagaaccgctcttgcttgccccgcgcctggaaccgagcctggcgcccttgctcgcacggcgcctgaaccgcccggacagcccgccgctgatccgcaccaccctggacgccaccctgcaacgtcgccttgaagacctgctgttgggctggcgcgcgcgtttgccggagcacacctcggccgcgatcctggtggtggaagaggaaaccatggccgtgcgggcctacctcggctcggtggatatcaacgacgtcaagcgcttcggccatgtggacatgatcagcgccctgcgttcgccgggctccaccttgaagcccttcctttatgggatggcgctggacgatgggctgatccactccgaatccctgctgcaggatgtgccccggcggtatggcgattaccggccgggcaacttctccatgggctttaccggtgcagtgccggcgagtacggcgctgtccagctcgctcaacctcccggcggtgcagttgctggaagcctacgggccgaagcgcttcgccgccgaaatgcgcatcggcggcgtgcctttggcattgccggcgttggccgagccgaacctggcgctgatcctgggcggtgcgggcagccgtcttgaagacctggtgagcggctacagtgccttcgctcgagacggcaaaagcgccacccttcgattgcaaccggacgacaccctcagagagcggccgttgctgtcgccaggctccgcctggattgtgcggcgcatcctcagcggccaggcgcgacccgaccgcgacccgcgtgccgagttggtgcagcgcccggtgctggcctggaagaccggcaccagctatggctttcgcgatgcctgggcgatcggtgtggggccgcgttacttgatcggcgtgtggatcggacgcccggacggcacgccggtgccgggccagttcggcctggcctccgccgcaccgttgatgttgcaggtgcacgatgtgctgaccaaccgcgacagccagcgcggtatcactgcaccggtcaagctggtgccggcaaatgtcggtgtggccgcgatctgttggccgctgggccagccgatgagccgcagcgatcccaactgccgccgccagcgctttgcctggacgctggacaacaccacgccacccactttgcaggcgttggaccagccgttgagcgtgggcttgatggaaagtgtgtgggtcaatgccaagggcttgcgggtggacgctcattgccctggcgccgagcccaggagtatcgccctgtggcccgcgcccctggagccttggctgcccagggccgaacgccgcgaagcgcgcattcccgcggccgaccctgattgcccgccaccggcgctggccgcgtcctcacctttatccatcgttggcgtacgtgaaggcgaccaactgcgcctgcccgctgccagccaacaggcgctgcgcctgaaaatctccgccctgggcggcagtggccggcgttggtggttccttaacggcgcgcccctgggcgacagcgccaaccaggactttatcaacgccagtttcgaacaacttgggcgttatcaactcagtgtcctcgacgaagccgggcagacggcgcgcatcgagttcagcgtcgttgattagatcgctatcgggggcaagccccctcccacactgggatgtgttggtctatcaaaggtgggagggggcttgcccccgaaggcggtctgaaggttcacttgccttcaaggccattccccccgaagctatccaccttcaggagcctgccgcatgaacctcgaacacctcaccgaacgcctgcaccgcatccgcgataccaaccactggaagccgttccacagcccgaaaaacctggccatggccgccagcgtggaaatggccgaactggtggaaatcttccaatggctgaccgaagaccagtcgcgccagctgccggccgacaaactcgcccatgccgggcaggaagtcggtgacatcgtgctgtacctgctcttgctgtgcagtgagctgggcctggacatgaacgaagtggtgcgcgccaaactggccgacagcgaacggcggtttgcccatgagtgaccgtcatttcgaccagttggccacgcgcttcgccgagaaaatctacggcggtgccaaaggcgcgatccgcctggcagtgctccaggccgacctcaccgaagccctgccaaagcgcccgctgcgtgtgctggatattggcgcgggcctgggccatatgtcgctgtggctggctgaacaaggccaccaggtgaccctggccgaaccggccgaaccgatgctcgaaggcgcccgccaacgtttcgccgaggcggggcagaccgcaacgtttatccatgcaccctggcaagacctgctcggccagctcaccgaaccctacgacctggtgctgtgccacgcggtgctggaatggctcgccgaaccccatgcgatcctgccggtgctgcaccaactcacggcgccgggtgggtggttgtccctggcgttctacaaccgcgatgcgctgatttatcgcaacctgctcaaaggccacttccgcaaaatgcgcaagaatgacatggccggcgaaaagcagagcctcacgccgcaacaaccgttggacccacgagaattggcggcgcaactcgaaggcctttggcaggtcgaaagccaaagtggcgtgcgggtgttccacgactatatgccggtggaattccaggcccgtgcggatttgcaggatcttttggagatggaactcgctcaccgtcgtcacccaagctttgccggacttgggcgttatttgcactggatctgccgtccggtttaagcggcccagtctgcggaggtcgaaatgcgtcgtctctgtttgatcctgttgtccctggggttgggcgcctgttcaagccccaatccttatgttgccgcgtcggcgccgatcccaccggcgccgccccaggcggcccacacctttgatgccagtgcctacccggcgccggtgcgcgattacggcgcctaccgcaattgggcctggcgcaacggccagcttccagcgggcacggcctgggccgattcggcgcagattgccgaagcggtcagcggcgccctcgaccagcgcggcctgcgccccttgcatgacaatcgcccggcggacctcttcgtcagcgccgacgtgtgcctggagaagcgtctcaagcaagtccaggatgactacggctacggttacggcggctacaaccgctatggcaatggctatggcatgtacaactcggtgccgatcgtgcgcacctatgaagtgcaggtcgtggtggtgcgcgtcaacctgttcgatgcccgcaccggccagccggtgtggagtgccagcgcagagacgggcagccagggcagcctcagtgagcggggagatgccttgcgccaggcggtgcagaaggcaatgacggcgtaccctcccagttaaccgctattctcatctttagcgcgggtcgctctttggagaacaaccatgtttcgtcgtatcgctacgctcgcttttgttgtgctgcttggcggttgccagaatgcccaggtcaaccacgattttgacgccagccgggatttcggcgcctaccgcagttgggcctggaaagacccggccctgcaatatcgccccgatgacccgcgcatcaagagcgacctcaccgaacagcgcatccgccaggccgtgggtgaacaactcgaccagcgcggcctgcgccctgcggcgcctggcaccagggctgacctgaacgtgcaggcctacctgatcgtcgaagaccgccagcaacaggtcaccaccaactacggcggcgcctggggcggcccgtggaatggctattggggcgcgccgatgtacaacgaaacgcgcaacatcacctacaaagtggcgaccatccagatcgacctgctcgatggcaaggacggcaaactggtctggcgcggcagcgacgaacagatgatggccacctcgcccaacccacaggaccgtgacaaagccatccgcaccaccgtcacccgcgtcctctccagctacccccctcactaacccctttaggcgcaggctcgccgtggtgagcaggcttgctttggccagcaggcttgctgtggcgagcaggcttgctgtggtgagcaggcttgccctgcgttgggctgcgaagcagccccctaaaaccgatttatggcaacgggccagcccttgtctacactcaaaaccatctacggagagtaagcgctaaggagtgcctgatgtctccccgacttggtgacaggcagcgtggtgcaattggcctgatggcggcggctaccctggcgatggccatggtgttcctgctgctggcggtagacagcggccgtctctacctggaaaagcgcaagctgcagtccgttgccgacagtgccgcgctggaagccgcaagccgtggcggcctgtgcacacccaccaccaccgccaatgactacgccgtgcagaacgccacacgcaacggcttcaccgtggtcgccggcgacaacagccgtggcctggccgtgacctgcggcacactgaccaccaatgccagcaatgtccgcgtgtttgcggccgatgccaccaaaaacgatgccgtccgcgtggtcgccacccgcagcgtgatgaccagcgtcgccagtgggctgtggaacatgttcagcggcgcgccgatgtctacccaaatggtgctgagtgccactgccgtggccgcctatgcaccgccggtggcgcaactgacgattcgcagcagtctggcctcggtgaactccggcaactccccgctattgaacatggtcatcggcaacctgttgggcggcagcctgtccctgaccgcagcgggctggaacggcttgctgacgacgaacgtcaatctgctcagttacctggaccagttggcgattcaattgaacgtcaaggcgggagactacgacgcgttgctgagcactgcggtatccgccagccagttgatcgacgcggcggtgaaggtcctgcaaaaaaacggcgcggtcgccacggcggtgatcaacgacgtgattacagtgaaagccatcgccccgaatacccagctgttgaaggtgggcgatctgttgaaggtcgctaccggtacaccagcggctgccttgaataccagtgtgcagttgtttcagttgctggagaccgtggcgcagctatccagtagcaaaagtgcggtcagtgcggcagcgcaggtgaatattcctctggttggcaccgtctcggtccagaccaaagtcatcgaaccgccgcaactgtctgcgtttggcaatccggccaaggccaaggctgggctgttgaataatccgccgacggaccagatttttgtacgaactgcccaggtacgcacgttggtcaccatcgatgcacccatcatcaaggtggtctctggggtttcctcgatactgaccgggctggcgacgcccgtgtcgaaggtggtcggcggtttgttgaacctgaacctgctcgatgtggtggccggtgtcgtgtgcatagtcgggtgcaatgtggctgatgtggatatcaccacgaccctgtccatctatatcgaggcggccagtgcagagagccacgtgacagacttcagttgcgccaccccggccaccaagtcgttgacggtgcaggccaccacctcactcgctaccttgggcgtcggctacgttgacccggtgtcggcgttttcatcgtccttgcctgtcaatgtgcagccggtgcggctgatcgactttggccaacgcttttgcctgctgaccctggtgtgcgggccacgcaccgccggtgttggcggtggcttgaacctgagggcgttgtccaccgtgggggcgcaaaccaatacggtgttgttttcgccggtgaatgacatcaatgcggcgacgatctacaaaagcccacccggcaccgccaatatcgttaacagcctgggggctaccttgagcggcttgcaggtgacctatgtcccacctaccggaagcacgcccggtgcgccgaacagcacagtcaccagtgcactggcgaccatcgtcaactcggtggtcagcctggtccagaacgtcctggcgccgatcctcgaccctatcgtcaacacgctgctcgcagccctgggtgtcaacctcggcaatgccgaagtcggcgccaacctcagttgccacatgggccgcgcctacctggtgatctagctgatcggcaactccacacaaaacttcgcgccgtgctcaccattggcgacgctcaggcgtccgcccatgttttccacaatcccataactcaccgacaaccccagcccggtgcccacgccaatcggcttggtggtgaagaacggttcgaaaatccgctccagcagccgtgggtcaatcccgccgccgttgtcttccacccagatccgcacatggcggctgtcgtgctcgcaatgcaccgcgatccagggacgaaattcgggatgtttaccccgtttgctcaacagcgcgtcacgggcattgaccatcaggttgatcaacacctgttcaagctggtcgacatagcctttgacctggacctggaagtccgccggggtgatccgcacctccacccccttgccgcgcagaccctcgccgagcagtgacagcgtgccgtccaccgcctgcgacgggtcgaaaggcagttgttcgatttccgagcggcggccgaacacccgcatatggtccaccacccgcgtggcgcgctgcacctgggcatcgatgcgctggagtttttcgatgaggtagtcgatctgtgcatcgccattgcccagacgcttgagcacattgacgatggccatgcgcatcacgttcagcggctggttgatttcatgggccaggccggtggccatttcacccagggtggccatcttggcgctttgcgtcagttgctgctgggagcggcgtacttcggtgttgtcacggcccaccgcctgcacttccaccagcgtgccctgttcatcgaacacaccacggtccgaccagacccaccaggcgtgttcgcgtccaggcaattccaggctgatttcggcggtgctgaccgggaattccggggttaactgttcgatgcgttgcacaaaggcctggcgttgttcgtccgacagccagtgccccaggttcagccccggcaattgcgcgggcaggcattccaggtagttggccagcggtgtgttgccgaaggtcagggtcaggtcggggcgatagcggcagatcatcgccggggagtcttcgaccaggatgcggtagcgttcttcgctctgcctgatttgctcggcggccagggttgcctcggtgacatccagccacaggccgacggcttccaccggcaggccgaggtcatcgcgcagcaacttggcttcgtccagcaaccagtggtagtggccctgtttgtcgcgcaggcggtagcgactgcgtacgctgccttcacgtagtaattggcggctgcgctcgaagtacagctcgcggtcttcggggtggatcaaggacgccaggctttcgtggttgcactcggccaaggtccagcccagcagcggtagcaggctgtcgctgaaaaaggccggatgcagggcgccgtcgacatagcgctgcacatagatcacggccggtgagctggcgatcaggttgtccaggcgcgcatgggcggcggcggcttgcagttgctggttcttgatgtcgctgatgtcgagcatgaaaccgatccagcggcggctgtcgcccacgcccagcacctggccctgcacgcgataccagagcgggtggtgctcggcgtcggtgcgttgcaggcgcacgctggtcagcaagggtttgcccagggcctgcaggtcgtgcagacggctgtcgagggcctggcgatcggccgggtggatcagttccagccactggctcaggggttggcgggtaggaccgtcttccaggctgaggctgtgcagcaactgcggggccagctggatttcctgggtggccggcagcagctcccaccagccggtgccgagcaggccctgcaacgcctccatacggtcgagctgctggtgatagcgctgctcgcgcagccggctcagcaggggcgcggcgagggcggcggcaaggttgagccagtcgcggtcgcgggtgtgttgctggccgttgtattggccacagagcaaccaggcggcgacgccctgactgtcgcggtagggcaccaggaaaccgtcggcatcgccgaagatactgtgcaggcgtgggttatcgctgcgctcctgggccaggctcaacggtgcattgccattgacgctgtccaggctgatccccaggtgttggccggcctgccacaaggcgggggcgtcgtgggcggcgtactggctgtagatccgccagccgtggtcttcgtcatcgagcaaggccagggcaacgcaggggatgtgccagcgctgggccaggctgcgcaggtgctcgttgaacacctcgggcaggcgggccaggctgcacacccgcaattgctcgctcatctggcaggcgagttgatggttctgttcgcggtgctgggccagttgccggccggcgagcaaatcgccaacgtcctgcaggcgcaggctccaggcatcaccgtcgggttcgatccagccgcgggtatgcagcacctggccggttgcggcctggaagtccaggtccaggccctggtgttgccagtcggcggggctgccttcgatagtcaaggcgctgctggcgcacagcagttcatgcagtggtggccggcgctcgccgatggcgtgcatcgcgagctgtgggcgcaggctgccactgatgctcagcacgtggcctagagcatccaattgcacctgcagccctggcaggggcacacccggcatgtcgaggggcggcgcgctggcgcgaccgagcaggcgcccgaagagtttgtcccccgacgtcaaaactgcagactcgaactggcggagaggttggccggcaggttcgggacggtgccgatccccggcagcaccagtgccgggaacacggaatacaggttggtagtggggtagttgatcgccacggtcaacgtggtgccgttgtaggtgctgctgatgtaactgggggagaactggaagctggaagggatccagctcaactgggtgatcacggtgtttttggcgcggtcggtcacctgcgtcccgtacgcggtgccggcggctatcgggtccaccgacagggcctggcgcacggcctccgccgccgcctggttgaacgactgcatcaacagcaacggcaggctatagctgatcaacccgtagaacacggcaaaaaagatcgcgaagaccagggcgaactcaatcgccgccgcacctttttgctttccaggcaggcctgttttcatgactgcgtctaccctgacggctactacttgatatcagcatagaatcattcagcgaaaagggatgttttttacgtgatccatggcgtggtgattctgctctggctggggctctgtgcgttgcaggatatgcgtcagcggcaaattgccaatggcctgaccctgggggcggcgctgctggcgctgatcttcttgctgtggacgggcacgacctggctcggagcgcccgccagcgagggcggcagggccttcgccctggccttgctgctgaccttgcccggctatgcgctgggccgctttggcgcgggggatgtgaagctgctggctgcgctggccctggccagtacgctggactatttgctgtggtcgttgatcggtgcggcgctgtttcaggcgtgctgggtgcttgtgagtcaaaggcttagggcgcgtcgggggaggacagatgtgcaggtgtcaaccaaacagccctttgccccctttgttttgacaggatttgtgctgtgctggctttggatccattagtcgaacaaccgctctgccgctatgtacatagtcggaaagtgcgtctacgtttatgtagtatccggatgttttttttgtccaaatggatggggcgccctttggcttgccaggcatggagtagcgcgtgaacaagcttacctcggcggtaaaagtgctcgtggtcgacgatcagccgttgatcgtggaagagctctgcgaatttcttgaaggcagcggttaccgctgcgtcccctgtgagtccagccgacacgctttgcagcgcttcagcgaagacctcgagatcggcctagtgctgtgcgacctgcatatgccggacatggatggcatcgaactggtgcaggccatgcagaaggtcgcgggcaagcagcgcgcgttcgaggccatcatgctcaccgggcgtgccgacaaacaggacgtgatcaaggccctgcgcgcggggatctcggattactaccagaagccgatcaacctcgatgagttgctcgaaggcctgcaacgccaggaagcggcgctggaggagcggcaaaaggagctgcacctggggcacctgaaccagaagctgcaatacctttccgaatccatcaacgatttgtaccaggacctcgacaaagtgcggcgcagtcctggcgccggcttggcggatgagggcgagccggtcgtcgatgatgccgggccgatcgaaatcccgaccatcttcaaccagctgtcgccgcgccagctcgatgttgcgcgcctggtgggcaagggccagaccaactaccagatcgcctgtgaactggggatcaccgaaaacaccgtcaagctgtacgtgtcccaggtgctgcgcctcacccatatgcataaccgtacccagctggcactggccctgtcgccggctacctcggcgctgcggcaacgggtgacggcgcactgacggttactgactcctcccacccttggacgacccgccggattgcgactcgaagaactccggaattggatgtttgttgctgtccaaccaacgctgcaaggcctgctctcgttctgcgggcgtggtccgttgtggcgtggcggaagctgcgcgcccatcgacctgcaaggccatccagttttcggtctccgcctggtagggggacgatgggccaggttcgatggccagtgcgctcaggggtagcagcgccagtgcgatgaagtagtgtgctttcatcttgctctccttacttgagggtcaccggcagggtttcgctgaccgctgcgactttgcgtgtcgccacgccggaggccttgagtttctccgcgcgggcctgggcctcggtgaactgttcgcggctcaggcccaactggctgacaaccttggccgcttgcccccagtcattctggtaaatcaacagcgtgaccaggttgacggccgccagcgggtcgccttgcttgagttcgatggcggtcatgaattcaaagcgggcgtcttccacccgtagttggttgaggtacaccacgcccaagtcattgcggatcttttcgtcagtgggtgccagctgcgcagcccgttgcaagtgagtcatggccaggccgttgttgcccctggcggccgccaattgcccgaggccgtgctcgccttcggccgtcatgcaggtgccgagcaggctgcggtacaacggctcggcttcgctgcgcccgagcaggcgataagtgcgggctttgcgctggcgcacctggggcagtgactcgggcaggttttgcaggttggccaggctggcgtgcagcttgccttcgttggccaggtcatcggacaggttcagcgccagctcctggtccgcgctcggcttggcgcaactgccgggtgaggtcagtgccgcccagggtgattggccgttggtggcgcagccgccgagcatcaacagtgtcaggccggcaatcagtgctttcatcaaggtctcctcaaaagtggctcaacgcgcgggcgatgccgataaaggccgggccgccgagcacgatcaacaaagcggggaacagaaacaccatcatcaccaccgacatttttgccgacatcttcgagatgtattcctgcaagcgggtcaggcgtcggtcgtcgagcagttgcttgagggccagcagggacttcatcgcgccgccaccctgctggatcaattgctggaggatgatgcaggtgtcggtgaactcatctacctccagcaggcgcgcggtcttgcccagttcctcgctcagctccagcccggaatcgacccgtgccaggatcagacgcagttcatgggtcagtgcaggcagcaggcgctgcgcttcgttgcccaccacccgcagcgactgttcaatcgccatgccggattcgaacaggatgcgcagcagtggaatgaaggttgaaatttccttggcgatggtctgctggcgatacttggccgcagcggcgagcacacgtttgggcagcaggtagccgatgcacagggcaaacatcggcgcaatccatgcggggtccgcgtgtgggaacagtatctgctggccaagcaaggtgagacccagcagcacaatcggtgtaccgacctggaaggcggcgaacagcgaacgctggctggccttgcgccaacccacgcggttcagcagggtctgggtctcgttgtccaggctgaccgaacgctgtgccaggctgctgccgcccagttggcggatgagcgtggcgagtttgtcatcagtgcccatccgcccctgcaagcgctccgtgaccctgcgctcgcgccgccggttttcgagcaactggccacccaccaggacggcggcggcgagcaacaacaaggcgaaggccagcagtgccatctcaaacactcctcagcatgcgccacatggccagggtcccggccatgtccatcgccaatgccacgaagagcagggtgcgcccggtgccgtcgttccacatggtcatcaagtattgcgggttgaccatcatgaagtagcccacgatcaggatgggcagcccgcccagcacataagcggtcatgcgcgtttcaccggtcatggccttgagttgcctcgcgccttgttcgcgctcgcggatcatcttgatcaggttttccagcagttcgctggcgttgccgccgtagcggtggttgaccttcaggccgagggcgaacaggcggaattcgtcctgctcgtagaactcggcaaagtcgctcaccgagtccggcaggctgacccccatgcgcacgttgcgctgcacgcgggccatggcgtccttgagtgggttttcaacgccctcgacgccgcccagtaccgcgtccgccagggttctgccggacttgaggctgcgtacgctatggtcgagcaactgcggcagttgctcgaccatgcgctgcacgcgccgttgataacgccagctgatgtacacgcgcagtaccaggggcggcgccacgaccatcgcgatcagccccagaccgtcggccagcagccagccgaacagcgcgcctatcacccaggcgctcagccacaggcccaggcggtcggtgggcttgcccagcccggcgcgctggaacatgcgctcaaggccgctccacttggtattcggctcctgggtgtcgggctggccttcgccgaggcgctccaacacgcggtctgtctgggctttgcgcaggccatgctgaaactgccagaacgacaggccgatcaacagcaggcagacaagcagcaacaccggtcctgtcatcacgcgctccctagggctgcaacgccgattcgcggcgcagtttgtcgccggccgggttgagggcttcgcgcaggaagccaaagccggtacgccggtccaggcggaacagggtattggtgacgtacacgtcatcacgcacaccgaccacttccaccacttcgctcacgcagcgacgcccatcgggcatgcgcgtcagttggatgatcacgtccagtgcggcgcagatcatctggcgcagggttttttcggcgattacccgcccggtcagacccaccagggtttccaggcgcagcaacgcatcctgggcgttgttggcgtgcacggtgctcatggagccgtcgtggccggtgttcatcgccgtcatcacgtcgagcacttcgacaccacggatctcgccaaggatgatgcggtccgggcgcatccgcagggcgttgcggatcaggtcgctggacttgacttcgccgtggccctcggcgttcggcggacgggtttccaggcgtaccacgtggggatggcccagttgcaattcggcgacgtcttcgatggtcaccaggcgctcgtgggggttgatcagctggctgaggatattcagcaacgtggttttgccggtgccggtaccgccgctgatcaggatattgcagcgcttgcccacggcctcttggaagaactcgaaaatgctctggtcgatggtctgcatggcgaccaggtcactactcttgagcatgtccttgcggaattttcggatcgacaggcacggcccatccagggcaatcggcgggatgatcgcattgactcggctgccatcgggcaggcgtgcatccaccatcggcgaagactcgtccaggcgccggcccagcggtgcgaggatgcgttgcatcacgcgctccacgtggtggtcgtcgatgaagcgcaggtcgctctggtgcagcagcccatcacgctcgatgaatacccgatggggcccgttgaccaggatctcggtcaccgaagggtcacgcaacagcacctccagcgggccgaaaccggtgagttcgtcgacgatctcttcggccaggcgctccgtttcatagcgcgagatcgccaggcgcatgcgcgtgatgtactcggagactttgtcgacgacgaattgcgccagggactggcgcgtgccttcgagcaggttcttgcccgactcctcgatggcgtcgatgatgtagcgatgcagcaccagtttcaggccatcgtgatctgtgttgccaccggcagcgcgggctgggccgccaaacagtttttcgccgctcatcgtccggaccccaggaagcgttcaaaccagcgcatcgagggctttgccaaaccctcggagcgttttgccaggcgctcgcccaaggcacgtacggcctgggtcaagggttcgcgtggcgccagggcgaacagggtctgaccctggtttttcacattcaggcgcaattcggcgctcaggggcagcacggcgacgcattcgaggccgaagctcttttccagggcttcggtgtccggcgcgcaggctttgatatagcggtccaccaccagcttggcgtgatcgagcttcatgcctttctcgcgccagcggttgatcactgccaggttgcggcggcagtccagcacgttctgatcggtacaccacagcagtttgtcgcaatggccgacaaaggtgcgcagggcttcgctgtccggctgaccggtaatgttcacgacgatgtgctggaagtgttggcgcaaggcgctgagcaacatgtacagctcggcggcgctggtgagtttgagcggttcgtcaccggtggcgtacgccaggatgcgcaggccatccagggcggtggtgaacgcgctgttgatcatggtggtgtcgaggcggcgcagatgccgcagcgcatcgccgaaattgaacgtgctctccaggcccagcagcgccaggctgtcgctgcgtggcaggcccaggtcgagcagcagggtctgctgcccgctcttctgcaccaccagcgccaggtgggtggccaacatcgccccatcggcgttgctctgggtgccgaacagtacggtcaggccacccagttgggcgttggatgtcacggtcggcaggcgcttgctcaggcgccgcaccaggccggccacttcgctggagcgtgagccgtaggcgacaaaatcccgagcgccggcacgcatggcattcagcacaagctggttgtccatgccatcgcccagggcgaccacggcgagcatcggcttggcttccagggcgccttcgatcagtgcgctctgggccaccaggttttcgcggtccaggccgatgaacaccaggttggcgaaggtcacgtcggccagtgccagcagttcgtcgaggctgccggtgccggcgctcaccacttggccaagcggtgcaagggctccctgcagccactcaaggtcggtggtgttgcgggtgatggcgaggaaggtctggctcaggctatcgctcattgggaaagtccactgcgacgatcgaagttgccgttttccaggaaaaacagccggtaccagttcgggtcgtagctgcgcagtttttcgcccggcaaggacggcagttgggcgttggcggccaacggttgcaccaggtgcggcgtgacgatcatcagcagttctttttcttcgcggctgatcgtggagtcgcggaagaacgcgccgaggatcgggatatcgcccagccccgggaatttgtcgatggtcgagcggttgttggtgctgatcaggccgctgatcacaaagctttcgccatcggccagggacacgctggtgtcggtgcggcgtacggtcagggccggcacctggatgccttggatctgcaccgcgttgctgtagtcgagctcgctgacttccggcgccaccttgagggtgatgcggttgcggtcgatcaccgtgggtgtcagcgtcaggcggatgccgaactccttgtactcgatagaaatggtgtcgctgccggagctgggcaccgggatgggcacctcaccgccggccaggaaggacgcgctctgcccgctcatggccaccaggcttgggcgtgccagggtgtaggcaaagccgctgcgctccagggcgttgatcatggccttgacccggccaccaccaaaaccgacgttgaagctgtccgtgctcaccggcagtttgaacacgccttccgagggggacaggatgttggggctgccgaggaaaaagtttgcacccgtgcccaacagcttggtgctggcttccttgagcttgctgcgactgacttccacgaagcggatatcggtctgcacctggctgggcagcaacgggtcttgcgagggcgacagcgacacgctggtcagcgccgaggtggccttgcccttgacgaacaccatgctctggcgcggcgcgctggcgcaggcggtccacaccagcaggctggtggcgccgctgctgacaccggtgagcagaaagttacggtcgccgttgacccgcacatcggcgatcttcgggtcaccgatggcaaggcgcgtgattgccacgggtgattgcagttcctgctgcaggccttctcccacctcgaccacggcgggcaactggcccagggcgctgcaattacccggcgctgccagagccatgccgatcggcaggctcgacagcgtcaaggcgcaggccagctgcgtgaacatgggtgcgtagcgatggctcattcaaggcatccttgttcgatcacggggtttgtggcgccgcttgggcgccgcgaatcacttcgatgccacggcgcacgccaggcccaccgccaaccggcgcgacgcgtttgggcgggccggtcaatgccagttgagtgaattggtaaaggtcgcggttggcactttccagcttctgcgcggtgtcatcttcaccggcccagtagcggctgagcagttgctcctcggcactgcgcacggccaggcgcaaggtcccggcttgcgccgcgagcatcaggcggcttaataaaggctccggcacggccagcaccacggtgcgtgcggcgaggcggcgttgtagggcctgggcgcgttcttcggcggtcgctggcggtggcactgccggctggccatcgttggccaggcccaattgatcgccgacgctgagcagacgcatggccggcaggacgatctgggccgactgttcggcgttgccggcatcctggcgcaggaacagcagcacatccacgtaatcgccggggctcaactggcctgcggcgccgaccacctcgtccacggccacggccagcgcgcgctcgttggggcggatcatgcgcgagagggggccaccggcgttgaaactgtcctcgttgagccaggtaccggcgccgagggctctcagggggatacggccgatggcctggtcgagctgggtcaggctgccggcgggcgcggtgcgcagtttctcgacggacaggtcggcggcggtcagtggcgtaaaggcaggcacctcatgccgcaagacaactaccggctggcgggtttggtcttcagcggcggcgagggttttttcaacggaaacgacaggtgcggcaggcgctacgacgggctcgggtgtgcggctcaacacaagtccccagtacccggcaatcaatgccccgatcagcaacaagccggccaggaccatgctgatgcgactgttcatgacggctctccctttcccgttgcactgcacaccctgttaatccaaacgggttaatccgcaacctggctgtgatgaacatctaacgatttggctatttgaaggtagctcagctaggacgaaatgccattaccgctggaaaaaattatctggcgtataaagttggccttttaaattgcagtgttgtggcgtcaactttgcgactaatactttgtgattaatccgttcttacagttgtgaggccgaggtttgttgacaatgctctaatggcacgccgcgatcatctggtggtagagcctttccggctttcagtggcgttttagggagaagtccaatgttccttgacatgatgttgaagctgtatgtccaaacccaacttttctttcaacgcaaagacggcgcgtccgggattgagtacgcgatcattgtggccatggttgcattggtgatcgtcggtgccggttctgggcttggaactaagatcaaatcgatcttcgacagcgtcgccactaagatgaccacttgatagcctgcttatccatgtggaaacgccttattaacgttcttcctgtccaggtacagctatgagcgcctcttcgccttgccgccaacaaattcttttggtggatgacgaagaggacgccttgatcgaactcgccgaatccctcgaaaacgaagggtttgtgtgtttcactgccaattctgtcacgttcgccctgcaagaattgacacttcaccccgacattgccctggtcatcaccgacctgcgcatgcccgaggaaagtggcatttccttgatcaagcgcctgcgcgaacacacctcacgctcccacctgccagtgattgtgatgtcgggtcatgccgaaatggatgatgtgagcgacatgctgcgcctgcaggtgctggacctgtttcgcaagccgatctacctggtgcggttgatcgatacgttgaacaacctttttcctctgcccaaaacggtgtagtgagctggcctggtaaaagcgggagtgctgcgcactccaacgcggggcaagcccgctcaccacattagagctggtagctgaagctcagcgaatagcgcggtcgacgatcgaagctgtccagggcttcgtccgacatcggcttggcggcttccagcgcgatgttgtagtacttggcgtcgccaaagcgcaggcccagcgccgccgatgacaggtcattgcccttgaccggcaggtcgttgaaccaggtcttggcgcggtcgaacaccacatagggttgcaggatcctcacccaatcaccggcgcggttgtagctgtagttgacctcgtatgccacgccccagcctttgtcgcccgtgccttggtcatcggggtagccgcggccgaaactctgcccgccgaaggtggcgcgctcgctgtccggcaggtagtcgttgctccagtagagcgcgccggacagcacgccttgccaattgccgaacagcttgttgctctgcacgccagacaggcgcaggcggaagaagtcgaggtcgggcttgaggccgccgaagtcggtgcgtgtcttggcacccatgccgttgatgccttggtagaggccgccgctgatgatgcgcaactgcgtgggatccgctttgcgccagtcgccctcgaaggccagggcgcgcaggttggtttccagctcgaaacgctgagggaaaccgctgagcttgtaccgggtggtctggtcgacggcgtagaggcgggcgccgaggttcagcgattcgctgggcgaggcgataaaagggtggctgaggccaaaggagtaacggtcgatttcctggtgcggcttgagttccaggccatcgcccagttgcaggctggtgcttgggtcggcgcggtagcgttcgcccgagagcgccagttgggtgccttcggcattgaggaactggctataggtcgcgcggtagtagtgctctttatcctggcccggcggaaacaggccactgatgctcagttgctcgcccatggaggtccacgaattgctggtgccggtcagcagcgcctgggtgccgccacggctggcctggttgaggctcatgctggtggtgacgggcttgcggctggcggtgacttgcatatgagtgccgccatcggtggtgctggggggcggcacttgagcctgcacggtcaggccagggatcgcactcatcagcgtggtgtagcgttcgaaggtcttgcgcgtgagcgggcgttcggcctggagttttcccgccagtttgtcgacataggaggagactgatccgatgtcgccttgcaactggtaatcgcggatgtagccctccaccagcaccacctgtaccaggccgttttcgaagtgctgttccggcaggaaggcgtaggacagcaagtagccgtcttcctggtagcgccgggtgatgctgcgggtggcttcgatcaattgcgccaggttggtttcatggccgatcagcggcgcgaatgcctgggcgacgtccttgagcgggtagacggtgccgccgtcgatctgcagtttgcgaatggtgaccttggtgtccatcatcagcggctgcccggcggtgggcgccggtgttggcacctgggtgggcgtgccggtaggccggtaggcgtcgacgggcagattgggcacgggcaggttgcggatggtgtcgttgctattgaggaaagtgggaagggtatcggcgtgggcgtaagcactgagggtgagcaataacaacggcgtcaaagcgcgcataggacactccatggtcaaaactgcagcagcgtttcgcagattcccgccgggctctgggggcgcggttcgggtgtctccaggggtcgatcattgacccaaaaaaaagacgagagacttagtggggtctctcgtctcaaccaagcgtaggcgctgtaggtgaggccgtctaatcggccaggtgcaattctattttgtgccgctcaggccacccaacagcccgccgagaacaccaccgtttgcattggcgccggcccccgcgcccgccgaggcaccggcacccacattgagaccgccgccgagcaagccgccaccggtgttggtgccgccggtgaccaggccgccgatcgacgccacggtgccacccactgcggtcacggtgccgcccagggcattggtgaccgggttggcgttggtggcgctgatttgcccgcccaggctgctgaccgcgccaccgacattagtgaccaggccattcaccgggccacccaggccggtggcgttgccgacgttttgcgtcaagctttgcacgccgctggtgacggggttcagtgcgccgccgatctggctggtcagccctgcaatgggggcgcctgccgccatgtttggagcgccgctgccgccgaggagggtacccagggaggccacggtggtgccggctttgacaccggtgacgccggtcgcgctgaccacgccattactgctgcctgcatccaggccgccaccggcaccggcaatcacgccaccgatcagttcaggcaaacccaaccggttgatgctgccgcctgtaccgccgccgctgttgccaccgttgttgccttcatttgggtcgacataaccgccagccttgctcaccacggtgccgacgccattgagcacattgcccaccgcacccgtcactgggttgccagtgccacctgcgccggcgacgttatcgcccaggccgtcgacggtatcgccaactttttgcagcaggccgcccacaggcttatcaagaccggtcgcggtgccgactttacccgtggtgttttccaccagggataccaccggtaccagcactctcgcgccgacggtgttggtcaccgagcccagtgggccggtggtgctggcggtgctcagggtgtcgcccagcatggtcacggcattgccgaccttgccgacgacgttgccgactaccggggctgcgccgctgacgaccggcactttacccagcagggtggcgacgttgctaccggtgacggtcacgccatcgcccaggtcggaaaccccattggccacgccggcgacggttttgcccaaggcattgctgtccgtgccaagcgagcccaggccatccgacaggccggtgccgatgctgccgaccgcgttgccggtggcattcaccaggccgcccgcagtggcgccaacgatgggcaggctgccaagggtggtgcccaggctcctgacggtgccgccgaggtcggtcacggtattaccgagggtgtcgaccacggtggcggtgaccaagggggtcgtgctgccgcctgggttggtgccaggatcggtgccggggttggtccctgggtcggtgccgccgcctgtcccgccacctgcacccgcacccgaggaggacccaccgctgtgatgcccgccaccaccgctgctgcagccgccgagtgccagtgctactgccagggccagcgcggtacttgctttccaaaacacgacttgagttttcatgattgagttccttgcacctgtacaaccttggttgtcttcaaacgctcgctacttctggggatagcgatgcgtttgtccgtgtggctatagcagccccggcggtgcgttctctcaatgctctacttggtattaacgatttatatacagcagcggtgtaccggttaagcaactaatgccaagggtataagggaaggatgtatcaagatgtatatatgttataaatcaattggttaaataaaaaaagcggacttcatgaagtccgctattacttagtgtgtatatatacaattaacctgtttgtttcaggcgatcggccgccacttgcctaccatatgttcaatatcgcccgcgcctttcaaccacaacgctccgctggaaccggcggcgctggccaataacgtcacttcaccgggcaggcgcacgggtttcctgaactcgacgtcgatctcgatattggcggcgggcaagtgttcgccgagcgcggcgagggtgtgcgccttgttccacagcccatgggcgatggcctgggggaagccgaacagcttggcggtcagggcgctgaggtggatcgggttgtaatcaccggagactcgcgcataacgacggccgatatcggcgggggctttccagcgggtcagctcgctgacctgggcgggagacggttgggtgatagcttctgtctcgccttccagcttcacgccccggcacagcatgcggctgtcggcttcccacagcaggccgagggaatcctcaaccgtggtgatcagatcgaaggttgcacccttggggtggggtttgaggttctgcgcgtgtacagccacgaaaaggtcgctcacaccccccaaggggcgatgaatgcggatgcggttactcaggtgaatcagccccagcagcgggaagggaaaacgtttatcggtgagcaactgcatctgcaggccgaacgccaggatatgcggatacgtcgccggcaggattgggccgtcggcaaagccgcagaccttgcgataggccgtcacccgctgggcatcgatgctgacccggcagcgcaacccgaactcgggcaatgtactgccggtgattttgcgcttgagggctgcgcgccaatacagcggcggcagagacggtgctgtgtctaacgtcttccattgcatgctcacgctcccaacagactttgcccacacacctgcaacgcttgcccgctgatcgcaccggagcccggttggcccagccaggccaccgcttcggcgacatcctgcggcaggccgccctggcccagcgaactcatgcgtcgcccggcctcgcgcaaggcgaacgggatatgcgcggtcatctgggtttcgataaaccccggcgccacggcattgatactgatgccgcgcgccttgagcagcggcgcccaggcctgtgcgaggccgatcaagccggccttgctcgccgcgtagttggtttgcccacggttgccggcgatgccgctgatcgacgccagcagcaccacgcgggcgttgtcatgcagggtgccgctgtcgagcagcgccttggtcagtacctgcggcgcattgaggttgacggccagcaccgcgtcccagtattccggggtcatgttcgccagggttttgtcacgggtgatacccgcgttgtgcaccaggatatccaggccatcgggcaggtgttcgatcaattgggtggcggcgtcttcggcgcagatatccagcgccacggtgcgtgcacccaggcgtgcggccagggcatcgaggtcggccttggcctggggcacgtcgagcaggatcacctcggcgccgtcgcgggcgagggtttcggcgatggatgcgccaatgccacgggcggcaccggtgaccagcgccttgcgcccggccaggggccgtgtccaatcttcgaccggcgtggcgcaggcctccaggcggatcacctggccggagatataggcgcttttcggcgagaggaagaaacgcagggcgccttccaactggtcttcggcaccgtcgccgacatacagcaattgcagcaccccgccgttgcgcagctctttggccagcgagcggctgaagccttccagggcgcgctgggcactggcagcgaacggatcgccgaggttttccggcgcacggccgaggatcaccaggtgcgcactgttatccaggtttttcagtagcggttggaagaactcgcgcaattgcttgagctgatcggtgtgttgcaagtcgctggcgtcgaacactacggccttgagcttggggccgtggccggggatccacgtcgacgtctctgcgccgtaggtgtagatcgcgtcggtgagcttgttggcgaacgcctgcaccttgctgaccagtgcaccgccgcccagcagcaatgcgccttccaccgggcgcaggcgcccggcttgccagcgttccaggcgtaccggcgacggcaggccaatggcggcgaccagacgatggccgaggcttgagttggcgaagtcgatataacggtcagacatggaacgctctccgaaggctggggttcaaagggttgaccatcccagggtagcagtcgttcgactaggctcagtaatccagcccacaacagacagagggagctttccatgactcaattgcgccgtgtagcgatcattggcggtaatcgcattcctttcgcgcgctccaatggcccttatgccacggcgagcaaccaggcaatgttgaccgcggccctcgaaggcctgatcgaacgctacaacctgcacggcctgcgcctgggcgaagtggctgccggcgcggtgctcaagcattcgcgggatttcaacctgacccgcgaatgtgtgctcggctcacgcctgtccccgcaaaccccggcctatgacattcaacaggcctgcggcaccggcctggaagcggcgttgctggtggccaacaagattgccctgggccagatcgaatgcgggattgccggtggggtcgacaccacctccgacgcgccgatcggcgtgaacgaagggctgcgcaagattctgctgcaagccaaccgcagcaagtccatggcggataaattaaaagtcctgttacaacttcgtccccatcacctcaagccggaactgccgcgcaacggcgaaccgcgtaccggtttgtccatggggcaacattgtgaattgatggcgcagacctggcagattccccgtgccgagcaggaccagttggccctggaaagccatcagaaaatggccgctgcttacgccgagggctggcacaacgatctgctcacgccgttcctgggcctgacccgtgacaacaacctgcgccccgacctgaccctggaaaaactcgccgccctcaagcctgccttcgaacgcagcgcaaagggcacgctcactgccggcaactccacgccgctcactgatggcgcatcgctggtgctcttgggcagtgaagcgtgggccagggagcgcggcttgccgatcctcgcgtacctgcgcgatggcgaagcggcagcggtggacttcgtcaacggtgccgaaggcctgctgatggcgccggtttatgcggtaccgcgcttgctggcgaggaatggtctgacgctgcaggacttcgattactacgagatccacgaagccttcgctgcccaagtgttgtgcacgctcaaggcctgggaagatgcggactactgcaagacgcgcctgggacttgacgcccccttgggctccatcgaccgtagccgcttgaacgttaaaggcagttccctggccgccggtcatccgtttgccgccaccggtgggcgtatcgtcgccaatctggccaagctgctggacgcggcgggccaggggcgtgggctgatttcgatctgcgcggcgggcggtcagggtgttacggcgatcattgagcgctgaaactggcatattggatgcattcttaagtgatcaacggtcggtagcctctcccaccggcgagctgattgccgtataacgagtgccatacgcgtatttggtaataaaggacccacaataaaagctgatgaagactcctaaacgcattgaacccctgatcgaagacggtctggtcgacgaagtgctgcgcccactcatgagtggtaaagaagcagctgtttatgtggtgcgctgcggcaacgaattgcgttgcgccaaggtttacaaggaggcgaacaaacgaagttttcgtcaagcgtccgaataccaggaaggccgtaaggtccgtaacagccggcaggcgcgggccatggccaagggctccaagttcggcaagaaagaaaccgaagatgcctggcagaacgccgaagtagcggcgttgttccgcctggccggtgcgggcgttcgcgtgccccagccgttcgacttcctcgaaggcgtgctgctgatggagctggtggccgacgagtacggcgatgcggcgccgcgtctgaacgacgtggtgctggagccggaccaggcgcgcgaataccacgccttcctgatttcccagatcgtgctgatgctgtgtaccggcctggtgcacggtgacctgtccgagttcaacgtactgctcacgccaaccggcccggtgattatcgacctgccccaggcggtggatgcggcgggcaacaaccacgcgttcagcatgctggagcgggacgtgggcaacatggcttcctatttcgggcgttttgccccggaattgaagaagaccaagtacgccaaggaaatgtgggcgctgtatgaagccggcaccctgcacccggccagcgtcttgaccggcgagttcgacgagccggaagaactggcggacgtcggcggtgtgattcgcgagatcgaagcggcgcggctggatgaagagcgtcgccaggcgattcgcgcggcggacgatgcgccgccgagcaaggtgccggacgaaccgccgccgccgccgtggatgcagtgatttccagataactggaaatcacaatgtgggagggggcttgcccccgattgcagtgggtcagctacagataagccggctgatccaccgctatcgggggcaagccccctcccacattggatttgtgtacattcggtcaggcgcagcagcttccggacgccaactccttgagaatcggacaatccggccggtgatcgccttggcagtgctccaccaggtcctgcaaggtatcgcgcaactgccccagctccaggatcttctggttcaactcatcgatatgctggcgcgccaaggcttttacatcggcgctggcccgttggcggtcctgccacagggtcagcagcttgccgacttcctccaatgaaaaccccaggtcgcgcgagcgtttgataaacgccagggtgtgcaagtcatccgcgccgtacacgcgatagccgctgtcggtacggtgggcggccttgagcaggccgatggattcgtagtaacgaatcatcttggcgctgagcccgctctgacgggcggcttggccgatgttcatgggcgttgatcctccaaatccttgggtttccaagtcttcaacagtaaggcattgctgaccacgctgacactcgacaaggccatcgcggcaccggccaataccgggttgagcaggccgaatgcggccagcggaatgccgatcaggttgtacacaaaggcccagaacaggttctgacggatcttggcgtaggtcttgcggctgatctccagtgcggccggcaccaggcgcgggtcgccgcgcatcagggtgataccggccgcgtgcatggccacgtcggtgccaccacccatggcgatgccgatatcggcggcggccagggccggggcgtcgttgatgccgtcgccgaccatggccaccacgccggtttttttcagctcggcgacagtagcggctttgtcggcgggcagtacctcggcgtgcacatcctctatgcccaaggcctcggcgaccacgcgggcgctgccgcgattatcgccagtgagtaaatgactgctgatgtgctgggccttgagttgctgtaccgcctccagcgcgccgggcttgagcgtatcgccaaaagcgaacagccccagcactcgcggttgggcgccttgcgcgatcagccaggacaaggtgcgaccttcggcctcccaggctttggccgagtcggccaggccccccgcgttcaaaccgttttcttcaagcaggcggcgattgcccagggccaactgctggccattcagcgtgccagcgatgccgcggccggtcagcgattggctggccgtcacatcggctacctccaacccttgctcgctacaggcatccagtacggctttggccaaagggtgttcactgccgcgttgcagcgcgccggcgtgttgcagcaggagcgcttcattgccatccacggctgccagatgagcgatctttggcgcgccggaggtgagggtgccggtcttgtcgaagaccacggcgctcacttcatgggcgcgctccaaggcttcggcgtccttgatcaggatgccgtggcgggcggcaaccccggtgccggccatgatcgcagtcggtgtggccaggcccaaggcacaggggcaggcgatcaccagcacggcgacggcattgatgatcgcggtctccagtgacgcgccgtacaaccaccagcccaccagggtgatcaatgccagtaccagcacggccgggacgaacacctggctgactttgtccaccagcttctggatcggtgccttggcggcctgggcgtcttccaccagacggatgatccgcgccagtacgctttcggcgcctagggccagggtgcgcaccagcaggcggccttcgccgttgatggcgccaccggtgactttgtcaccaggttgtttcggcacgggcaggctttcgccgctgatcaaggcttcgtcggcgtggctttggccttcgaccacttcaccgtccaccgggaagcgctcgccgggttttaccagcaccaggtcattgagtttcaacgcgttgatggcgacatcttcttcacggccgtcgagcactcgaatcgcccgctcggggcgcagggcttccagggcgcggatggcgctggcggtctggcgcttggcgcggctctccaggtatttacccaacagcaccagggcgatcaccaccgccgacgcttcgaagtacaggtgcggcgccatgccagggtgagcggtgagccattcgtaaatactcaggccgtaaccggcgctggtgccgatggcgaccagcaggtccatattgccggcaccggcccgcacggctttccaggcagcgatgtaaaagcgtgcgccgaagatgaattgcaccggcgtggccagggcgaactgcgcccaggccggcagcatccaatgcacgccaaagggctccaccagcatcggcaacaccaacggcagtgccagtaggatcgccagcagcagcgcccaccgctcgcggagcaggcgccgggcctgatcggcatcggtggcggtttcgctttggggcagggtggcggtgtagccggctttgtcgacggcagcgatcagcacgcaggggtccatctggccgagcacttcaacatgggcgcgttcgttggccaggttgacgctgacgctttgcacccccggcaccttgcccagcgcgcgctcgacccggccggcacagctggcgcaggtcatgccactgatgggcaggtcaaaggtggtggatccattcatggggcagtcctccaggagaagttgcccctagcatcaaccttgacctgtggggaaggtcaagcgcgatcgttcccacgctcggcgtgggaatgcatccagtgacgctctgcgtcacgattctttttgctcagtattccaatgcggcgggtttcagatacatcccgtccggcccttgggcaatgcgcaacttgcgcacatcaccgaccttcagcgtgatgttctgcgcaggcggcgccagcaggcccggtaggcaacccggggcctggcccggcaacagcttcaagcgcagggacaggttgcccgccggcaggttgaacgaagtggcctgctcctggaacagccggcccgccaactggtcattcaggtacaggccgatctcgcagttggtcggcacttccaggcgttcccgggaaatgatcagcaccgcatagtcttctgcggcgagggcttggggcgctgcggccgacaggctcatcaggccggcaagggcaaaaaacgaccagcgcatggcgaatgctccgtggtttaaatcgacgatgagtgaagcttggcctttgaagcggccaaataccagcccggcagacatttgcggaacttgaccttgccatcgtggcaaggtcgagactgggtccaacctcatcaaaggagtcatgtcatgcaagtattcagcgttgaaggaatgacctgcggccattgcgttcgagcggtgacccaggcagtgcagggccaggacccggcggccagcgtgaaggtcgacctggcagcaaaggaagtgggcgtcgaaagccgcctgtctgccgagcaagtgatcgaggcgatcgcagaagaaggctatagcgccaagcttgcctgaggcggaaaaatagttagcgagctatcgtgttcaatgcacccaagcgcggctagactatcgggctgccgactcacttgggtgcccgatgaacctccgcataatcctgatcctgggtgccttgagcgccttcgcgccgctggcgatcgatttttacctgccgggcttcccggccatggccaaggccttcgccaccgatgaaaaacacatccagctgaccctggcggtgtacttcggcggcctggccatcggccaattgatctacggcccgctggcggaccgcttcggtcggcgcggcccgctgctcagcggcgtcaccttgttcaccttggcctccttcgcctgcgcctttgcgccgtcactggaatggctgattggcgcgcgtttcgtgcaagccctgggcggctgcgcgggcatggtgatttcccgcgccgtggtcagcgacaaatgcgatgcggtgggctcggccaaagtcttttcccaactgatgctggtcactggcctggcgccgatcctcgcaccgttggccggtggggtgatggtggggctgtggggctggcagtcgattttcctggcgctgtcgatattcagcgtgatggcggccatcgcggtcgccgtcgggctgccggaaacctttccggcccatcagccgcgccagccgttgtccggctcgttgcgtcgctatgcggccttgttgtcggaccgggtctacttgggctacgccctcaccggcggtatctcgattgccgggatgtttgcctacatcgccggttcacctttcgtgtttatccaactttacggcgtgccagccgagcattacggctggctgtttggctccaacgctgcgggatttatcctggtggcccaggtgaatgcgcggctgctgtccaagcgcgggccggcgtttctgctgtcgcgcagtgtgtgggtctacctgctggcggcgttgacgttgctgggcatcgcggcgttgcgcaccgatgcgctgtggccattgctggcgccactgtttatctgcatcgccagcctgggctgcattttgcccaatacctcggcctgcgccatgagcgggcagggcgcacgggccggtagcgcttcggcgttgctcggctgcattcagtttggcgtggccgccggcgccgcttcgttggtcggcgtgttgcacgacggcacggcgatgccgatggccatggtcatcagcttgtgcggtgtattggcggtgacgattgcgatgtcgacccagcgcctgcaacgcaaacgggccttgcaggcgcaggtctgaagagcgggtcagccagcggcagaacgttgctggctgatgggaaaacggtggggcgcctggatacgggcttgcagggtgtcggcaaaggcacgggcctcggcctcggtgcggaaggtgaaggcgtcctggtcgagacgcacctgccatttattgcctgcggattttgctaacgcttttatcaggattttcattgctgacttcctcacgtaaaagaatcgtggcaaaggcggccaatataaacccgaatacgctcacacatatgacaaagatcaactctctgactagcggtgtcgtccattactcacatgaataatggacgacactgacagccttttttcagaacccttccagcacgatcttgcccttggccttgccgctttccagcagcgcatgggcacggcgcaggttggccgcattgatcacgccgaagtgctcgcctaccgtggttttcagggtgccggcgtcgatcagttcagccacgcggttgagcaggttgtgttgctcgatcatgtccggcgtctcgaacatcgaacgggtgtacatgaactcccagtgcaacgacaggctcttgcgcttgagcttgctgacgtccagcgccttgggatcgtcgatcagcgccagcttgccctggggttgcagcgcttccaccagttggtccaggtgatggtcggtctgggtcaggctggcgacgtgggtcacgtgcgggtggccggcggctttcagcgcttcgctcaacggttggctgtggtcgatcaccaggtcggcaccgagggccgtggtccacgcctgggtttcagggcgcgaagcggtgccgatcactttcagggcagtgagctggctggccagttgggtcaggatcgaacccacaccaccggcggcaccgacaatcagcaggctctggccttcatcctgattaccctcacgcacttgcaggcgttcgaacagcagctcccaggcggtgatcgccgtcagcggcagcgcggcggcttcggcaaagcccaggcttttcggcatatggccgacgatgcgctcatccacggtgtgcagttcgctgttgccacccgggcgcaccagggatcccgcgtagaacaccttgtcaccggccttgaacagcgtcacgtcgctgccgacggccttgaccacaccggccacatcccagcccagcaccttggcggcgccgttttccggggcgacgttctggcgcaccttggtgtccaccgggttgaccgagatggctttgacttccaccagcaggtcacgcgggccggcgacgggggctggcaactcgatatcttgcaaggcgtttggatcgttgatcggcagtgaggcgtagtaggcaatggctttcatggaggctccgaaaaaaggatggcgatcaggcaagaaatttcaggcgcttgagttcgaagtgttcgatcacatcagcggccttggcgcgaaagttttggatatgcgcgctctggtcgtggtcggcgagcgccgcgtcgtcgctccagcgttcgagcatgtagaaggtctcgggatgttgcaggtcctggtgcaggtcgtactgttcgcaaccggcttccaggcgcgtgggttccagcaggtcgcgcagcaagggttccagggtggcctgttggccgggtttggcgatcagcgtggcaatgacgttaaaggcagtggacatattcaactccagacacgtgatgaacgggatgcacagatgattggctatttcccgcgcagataaaagcggctaaaacagcaggctgtttcaatgaaattttgataatgagcgggaatgcatgctgcgctttgatgatttgcaattgtttgtacgggcggcggacctggggagcctgtccgccgccgcacgggtgatggatttgtcgcccgccgtggccagcgccgcgctcaagcgtattgagcagcaactgggcacgcgcttgctggcccgctccacccgcagcctgcgcctgaccgccgaaggcgagggcttcctggaatatgcccgcgcagcgctgagttcgctggacgaaggccgccgtttattggccagcggccaggaccatgtcagcggtgtgctgcagctgtcggctccgtcggattttgggcgtaaccagttgctgccgtggctggatgaatttcagcgtgagtacccgcaactcaccgtgcgcctgctgttgggcgatcggattgccgatctgtttcgccagccggtggatattgccctgcgttacggtgagcccgaagattcgagccttatcgcactgcccgttgcgccggataacgtacgggtgctgtgcgcctcccccagctacctcgcacgtcatggtcagcctcggcacctggagcagttggcccagcacaattgcctgctctatatgctcggcagccgggtccatgaccactggacctttcacgacggtaaacgcgaggtcagcctgacggtgaccggcgaccgcttcagtgacgatgccgacgtggtccgccgttgggcggtggcgggtgtggggattgcctacaaatcctggctggatgtcagcaccgatgtgctcgcggggcgcttgcgcctgatcctgccggagctgcgcggtgagcgcacgccgctcaatctactgtgtgcccatcgtgcgcaactgagcaaacccatcaacctgttgcgggaaatgctcgtgtctcgctgtgcgacgttgaccgctcaattgccggagcgattgaacgcgatgtaacgccctccatcacagcaggaaatttcattcaggttctgtccctatccacgctgtcagacgccgtggaaccggtggtttgcgcccctatactttggctcccgcatcagtagaaaaataagccaacagggagtgaaaagatggaagcagcaccttgcatcagtcagatcgccagcttgcttgccgagcctaaacgaaccgccatgctgtgggccttgatggacggttcagccaagtcgccggtagaactggcgacgctcgccgggttgtccgcgacctccgcccatgcgcatttggcgcgactgaccgcaggcggtttgctgcgtgtggaagccaggcgtggcaagcgcctgtttcgcgtggcggcgccggatgtcagtgccgccatcgatgccctggccaggaccaccatggcctgcgcagcgcgcagcgcgccggatgctttgccgccgaccctgcttgctccgccgtcgttacgtcatgcccgtttgtgccatgggcaccttggtggcgagttgggggcgcagttatatcaacatctgctggaagcaggctggatcgagcgctacgaacagcgtaccgatgtcacggtgaagggcgcgaagcgcttggcaaaactggggatttttacccaggcattggcatcgccgctggtgtgcagctgctttgactggagccagcagcagccgcacctgggtggtgcgttggggacggggttgttgcaactgtttttgcagtcgaactggatcagcgtgatcaatgagtcccaggccttgcaggttcatgccatcgggcgacaggaaatcacccgattggccgtgccaccaaggagctgaccgtgtaggagccagcaagccgcctcctactgggttacggttttaccagtcgcgcatccaggctgttttgcgccaggcgtttggcctggtcctgggtcatgcccagtgaggtgtacaacgcgtggaagttctcggtgacataaccgccgaagtacgccgggtcatccgagttcacggtcaccttcacaccacgttcgagcatgtcgaggatgttgtgctgggccatgtcgtcgaacacgcacagcttggtgttggacagcgggcacacggtcagtgggatctgctcgtcgatgatgcgctgcatcaggcgctcgtcttcgatggcgcgtacgccatggtcgatacgctggattttcagcaggtcgatggcttcccagatgtactccggcgggccttcttcaccggcgtgggcgacggtgaggaagccttcgtggcgggcacggtcgaacacacgctggaatttgcttggcgggtgacccatctccgagctgtccaggcccacggcgacgaacgcgtcgcggaacggcagggcctggtcgagggttttttcggcttcggcttcgctcaggtggcgcaggaagctgaggatcaagccgctggtgatgcccagttgctgctcgccatctttcagcgccgcagcgataccgttgagcacgacttcgaagggtatgccacggtcggtgtgggtttgcgggtcgaagaagggttcggtgtggatcacattctgcgctttgcagcgcagcaggtaggcccaggtcaggtcgtagaaatcctgggaagtgcgcagcacgtcggcgcccttgtaatacaggtcgaggaattcctgcaggttgttgaaggcgtaggccttgcgcagggtttcgacgtcgttccacggcagcgcaatcttgttgcgctcggccagggcaaacagcagctccggctccagcgagccttccaggtgcaggtgcagttcagccttgggcagggcgttgagccaatcgtacattttctaaattctcatcaggtgcaatggcggcattctacaggccatggctgaaataatcggcaaaacctgaccagcaggattgttttcgttgcattcgcgcaagggccttgtgaactaaggtgtaacgaaacgttagcggcttggcgcagtctgtaccccatcaatgactgatttgccgtactaaaaggcccggaatgctcacatccctcaagcaagaaaaattcatgctgctggcgctgattgccgccatcgccgcctacccgctggagcactggatgctcaatagcgggcaaatcacggcgctgttggccggcgtggcgctgatcggctttatcgtggtggcgtcgatgcgcgtggcccatcacgccgaacaacttgcggaaaaggtcggtgacccctacggcaccatgatcctcaccctcgccgccgtgctggtggaagtggtgatcctggcgatcatgatgagcaacgagccgtcgcccacgctggtgcgcgacaccatctattcggcggtaattttctagacacactccgctttggtgtcaaagcccttaggctttgacctgctcttgctcttgatggggaagattaagatgtgtatttgattgggagtgctcttgcattgtccttcctgacacacctctatctatggcataccccggaagcccggagattttcctcagcccgtgtttgtgactctgcttgaggtctaaggatgacttgctgtgtggggagcatccttgccgcgagttcatacaagatcagcgacacgcggctatctgtcaggcatttggctgggcggaaagaaatggcgttacgtatgtgacgaactcagcatgaggagtgcgatgctcattccaccttggagggtttgatgccggtcgatagcgtaagtcgcatgtcgtgatcatcaaccgctccttggcgcgtgaaacacccacaaagaagccgcaacgctcctcttggactttgccccaaaatgtctgtgtttctacaccgatcataattacagagtggaattccaatcctttacttttatgaatcgtcagaaaacggactgcttgatcgttggagaacagatcaagtgctttgagcaaatccggttcttgctcgagcagtttctcaatttgctgtctcgtgttcttgataacctcgttcaatctggcatttgcttcgtagtcagaagaaagggtggtcagcacgggtaggccgatgttctttaggaacttcatagttagctcccaccatcctgaataaggcgcgtcagatcgggccaattttttcacttccttgcgctgggcaagatagaggcgctcgaagtttctctggatctcagattcaccgtcctcgtcattaaatgaaaccagttgctccatcaaattgatccacgccttcggttctcgctcccgatacaggcatgataggtagtcaataattaggcgagcggcgggctcattaactagatcttgagactcatgctcgttgcgaaagggaattcctctggctgccagttgctccatgagtagggtgccgtagaggtctatctgcctgggaaaaagaatcgctatttctggtaggggtattttctctacatctatccacttctggatgatgttggccaacgcggctgcttcgctgtgactgttgtcgtagtttcgagcgaggagttcgccgtcgtttccaatgatcaggtcatctgccatcaccgcagcaggatcaagtgttcgaatgatctcgttctgcatccgcaaaagccgaggcttagatcggaagtttcgatatagattgagtggtcgggcgtcgaagtcctttgcgtagtctataaatatgccatccagtgctcccgcccagcccataattttctgtttggtgtcaccgacggcggtcaatcgaattggcttattcatgaagacaagcttcagcagtgcgtactgctcagtagtgcagtcttgaaactcatcaaggaatacatcagcgtaggtctgacaaattgcatttcttgcaaccactgaattgctcaagatcttcgttgcgagaggtatgagctgcgcgaacttaatttgtttgccttgaattggttcgtcgcctatggagtagtttggctcaagagagtccccgcccgtgagcacgggtctaaacctatcaatgatgcgcttggcgaagccgtgaaaggtgtagctgtcgaagcgtgcagccagatcaagtccgcatctgcgacgaatccgttccttgaggtttatgctcgcatcgaccttgaaggagatcgccagtattcgcttggggtatcggcagtttccggtgcgtagcaaaaagtctgcacgctgcgccagaacttccgttttgcctgcgcctgggcctgcggtgagcgcgagcgactttccaagctccctcacagcgagaagggcgtttgtttccaaggtcaagccatcggcgactttccatacatccgcgctgatcattctgggatgtcctccagcgccgcgatgattgcgtcggctaaacgatctagcgatggaggaaggctttttagcagatcttcgtcagtcagcttcgcaagggcggagatgtgtgctgcgggcttgctacctaatttgaattttgagtgataggttccaaacagttcctgctcatttgcatcatattgaccggcgttacagtgactctttccgagcactgccttaagagttgattcgtcaggagggcttcgggaaacaccgtacgcttttgggtaggctagaagcatggagaaatctagatccataggatccgaaaaataaacgccccgtttttcaagttcggaaaaaatgcttattgttccttcctcaaaccagtggtcggttcgaactggaagatcttcgttccacttagctatttcccagttaggtagttttttatctggagaaaactttgccaactgattattgacgttgctaatccgcccccacccaccttgatgtcgtgcgacatcgagatccaagagggtcacaaaaggcgtttctaatgcagccagcaagcgccagaaatgattgacgtggcgtccccccagtggagcgattgtcaccgctgactcatcaacaggtgcgcctttcgcttgaagtattcttggaaggacaatttcctcactgtcaccttcgcctagtacaaccagcctagagaaataaacttcaggaaaagcctgcacagcctctcggacaaacttatgagcctcatcctctttgtcgggtagtgctatgcaggtgaccttagttgcacggctcgcagccaagcgtagatagcggatgttctcgggatccacgcggcggagcatggacggggcatgggtcgcaatgattgcctgagagtcagcccctccaattgagctattgagggcgttcacgatgcgcccgaggtaatgaggagagaggctgttttctggctcctccactgcgatcagtgtgaatgacggtggcttcagtttgtcagcgtcgaaagaaacgtccttaccggttaggactgcacgcccgatggcgtgagaggacaacaccagtgataggtaaagcatcgacttctgtccatcgctgaggcgagagaagtcgactagattctcgtcgtgccctggggagaacgacactgacatgtgtcttagaagcgactcaatttcggatgtgacgaaagtgagcttgggatcggtgaaaaaggtgcctctgtgaagtcgcttccacatcccattcaggctttcactgaatgcacttaccgactggtttcctgataaacattcgctgatttcgtcagtgagtcctttaatccttgcgcggtcatcttcccaattgacggctcgtagcaagcgtccgagcagggcgttagctccataggttatgtggtcggcagggtctcgtctggcggggaggtaatgcatttgaatggtattgcgatgcgcccgagtgacgactgcggtcgatagtgggttggcgtttctatcaacatcaaggacataaactaggttctcttcaatgtctccatcaatcccgatggtcgcgctcaatcgatatctaacacgcgggatgccgtcggctgtatccaatcgcatatgagcgaaatgcggggccacggtcgagttgtcttcatcctccagaagctctgggaattcgaaatccgcttccagccataggctgcgctcctcaggtaccaaatcctcatcagcaggcacatggaagtcagatcgcttgatccgacgcaggcttggatcaaaggcaaacaacctgcagagcgcttgcaggactgctgtctttccagagccattggggccgataaggtaggtgacatcctcgaatgtgattaccgtaggttcattgccgaaggattgaaaattacatagccgaatactgtgcagcttcattgctcaccgcccatcgtccaggatgtgtacgtaccgcgtctgctgactcggttcgcgtcgccgacagccgaacgggtcggatatcgctgacttagaataggcggtttgatttaaaagatgttagtaggccagcattcagtaaagattatttggtgcggtcttgaaggctctgttgcagatcgcctagctattgatgaacggcatggcgtgcccattgtctagaaaggtgctctccgtaatccggtgacgacagggtaatcctgagcctacggagggagcgtatgcggggcattagcatcggtatgcattaggtaggtgggggaacagaataaatcaacgcaaggagccttagatggccggcagtagcttgttcgcactattggatgacattgccacactgctagacgacatctcactcatgagtaaagtcgctgcaaagaaatcagctagtgtcctgagcgacgaccttgctgtgaatgctgagcaggttaccggcatgaaagccgaccgagagctaccggtggtatgggctgtattcaagggctcgttgagaaacaaagccatccttgtgccttgtgctttggtgttgaacgcacttttgcctgcggcggttcactggctgctcatgattgggggggcatatctctgttatgagggctttgaggctatcaaggacaagctcacggctggtcgagacgatgacacagggcagccaaagaaaacgaagcctaagacgcctgaagagcttgcagcttatgaaaagcggaagattgcaggggctgttcgaacggacttcattctgagcgccgagatcatcgtcatcacactaaatatcgttactgatgccccgatgctccaacagattttgacgttagcgctgatcgcggtagtcatgacagtgggcgtttacggattggtcgcggggatcgtccgcttggatgatgctggccttattctccagaagtctaaagctaccggtacatggggttctgtggtgcggactgtcgggcgatggctgctgtcggctgctccgaagcttatgaaagcattatcctggatcggaactgtggcaatgttcctggtcgggggggcgttcattacagaaggcatcgggccgatgcagcactttgctgagagactggtcgaaggggcaggggcgtgggaaaccttcgcaactttaggcattcactgcctggtaggcgcgcttgtaggcatggttgccgtacttgtggtcaaaagcatcacatccatcactggaagtaaggcttaaagctagctctcatcgacgatgttgaatctggaatcgcatacaatcttacttcgtaaggaatcgctgggttcagcgccgttgatcccataacagcgtttggcataaggtgagtcgaactggcgttttaagcctgaaaagtagggcagtgggccgagagaggagcattggctaatgctaatgtcctgcttctctagccctcatatcatccgttatgaccttgatcatcttgaaatactctgctctaccttggattgcttctggagtagattcaatttctagatttgccatatggacagcaggatctatgacgtaatggctcgcctgcatatagttcttgatggctgggataatccagcatgcgggatagaaacggagaattccattaccagccttctgaatcataccgacccaggcaacctggttggatttaggcattaggttagaaaccatcccaccactcattccattcatttctgagtgtgtgatctgactaagaaaacgcaggatgggggctgatccttcgaactcacaaacaccgtgaaagatatgcttattgatcactgtcgagcagttgtagtcatcgccatacggatactcaatcgggttttcatctattgggtagccagaggctaccaataacatgccgtcatacaaatcgcttacagctacggctatacggccattcgtgccatctaggtcgatgaatttatcgggaaaacggaatagcgaggatgaaagctcgatcagcacgatgtcttgcatgtcgatacagggactatctgccgttatcagctcaccgatacgccagccgcgcattgggaatcccataccctctattccttcccagcctctcttagcaaagaggtgagtgaagaacggcgactcattttgtgccgcctcgtagttcgcatctagaacgtgttgagccgtcaggagaaaaaatttctgctggtacttgatcagtattcctgtcccgcctttgctatagaccatatcggcgtgataccggccaagctcttcaataggctgagagcaatgggtgaatataagccttctcacagactgaattacgttgctctgagacgtattctcgtagaaccgatttagctttcgtactggaattttaatgttttaacttcctgtatcgcagggtagaaatttgttgcggttacggagcttgaagcttcgtctgcatgtcagcgacatcgccctattttctagccaaaccgctcctgagtatcacagccaaaacaactgccagccaacggttagccaactttccaaggtagatccaccggcaggtcaatttgcaagctgctagccgctacgtccagatctgcggtggtctccgcaaccatctgaacctgaaactcggcatctgcatatcgctccataagtggcgcacgcatcagtaatactcgaacgcgagccttgaggcgctgcccctctggatgcccacaagcgatcaacctgcctatgcgtcccatcactcgacgcgcctccttttcatcatcagcggacagctgacctgaattaccttcgaagcgatcctctagctgtttcacggcggcgcggattgccatccgatgttttttgggaagcgccggtatcggcccgttcaccactaatccggtcacggtgacggcgtcagctttatcgctagtgatcaatgcttgcccgcgcttacgaacatgcagcttgctccgcttctgcaggcagcctttttgtccgagcatccatgtgacagaggcaataacttgggtggtggtagcttgatcaatacgagttttgctagatacagtaatgtcatctgcgaagcgcgaatacgccagtccctgagctttaaagcgagtgacgagcgccggctcgatatcccaaaacactaggttggccaagtaactacttgtactcgccccttgtggaacctggccctcacgagtaactagatccgcaagcagagtggctacatctgcggagaagcggaagagacccacgaacaagcgatgaatgtgctcgtttgtaattgaggggaagaaatcagcgatgtcctgaagaatgactgtcttggcgccggtatgaacccgagcgttcgagtaaatgctgcggggtagcttgggatctctgataccgccgtgcaggtatccagggaacgcaaccttgctgaggatccgatccacgatcttgcgctggatagtcttcagaggctcatgagcatcataggtatgtctgggtgttatgccgtctttttttgtttgcgggacatatcgataaaggcgagagctgcgatgagcaagtgcgattagcctctcgactggctctccgagagcacgtgctaaggcgctgatgctgtggatagggctatgaggatagaacggagcatccatgtccaagcttccggtgatgggccggccccgaagaaccggcccctctgaattcgaatgatgtggtttgttgtgtcatgggaggttctcaataaatggaatcaccactgtctcgacaaaatcccagccctcaacagccttctcccataaccagatgcatagacgaatacgtgcgatccacttgagcagggttactgccttcgcctttacccacgcaatccgacccgctttaggttcttgagatggagctgtctcgatgacacgagcatcttcactgttgtgcatagactgacgcgccttgcggcgcgctaggttctttaaattaaccatgactgatgttcccaacgacaggcgaaattgccccgccgccaagcattccgggccgaaaggaacgctgaagatgccactacaaaccacagttctgcttatcaagtcccttgataagccgtccgccgcattaccgccacatcacatttcgcctcaacgcatcaaacgatcagagacaaacccttggatcacctttgggattgccctaggcgctaagcactcaggagcgatgggcagcaccaacctgcacggcgaagaaagccaaggcgaacaccaaggcgaccagtttcccggtcaaaaaccgcgagcccaaatttcagtcatatttaaagagcacttgggtggtagcacccaacagacgcagtatttatcagaataaacaaaccggcgacaactgttatttgttgcaagagttgtttttcgtataagtcgtatttttgactatataaagcgtcaaaatttaagtgtcactcgtattagtgccacctaggaaatttatcatctttcaagttgtcgagttgggctcgttgacctattatcccactaggcggtgatggtcgcctggcgcctgtttcgcgaagcaatagcccatctgtgacaccatccagcattacatcggcatgtccctaaccagacgctgcccggtgaacaggcaatcggtcacctaagcgtcgtagatttaggagctattgccatgtctgatttttccccgctaaacatcttcaaatctcaagctaaacagcttgctcgtgatcagggcctgaagctttctgtcgctcaagaaacccttgtgcaaaaagcaggcttcgctgattaccatgagttttcagtagtcgcccagcggaaccccagagatccgcgtctgatggtggctgtgtttgggatcaaagactttccccaagcgatccatgaggacgatgtctacgcagatctggagcaggaacttgaggagcagctctctgatgcgattgcagagaccaacgcaagcggattcaccatagacgccttgacgatcaataccgctgactacaccgattcaaccgggatgctgagcttgggagtctcgctgacctaccagggccagcaagaccaggaacgggtgtatcacggtgcagcgttctttcttactgccacggtcgagttgctgcgccgtgatagtaagtggcagcttgctgaggacggcgtgtccatcgcggacggtgagtctgatgctgaccgcgaccgtaggtctgagcaggagtattgggcaacggtggaagaagcccgaagtagcaaccgcatgtccatggcccaagcccttgcgattgaactggggataactgtcgacaacgccgagcttttggccggatcagagatcacaaccaacgaatctgacgacgggctcgtatacagttactggatcaatttcgaaccagaagctgaaggtgaactgagagcagacctgcttgcacgattcggttctctagagtacgagctacacgcaaatttcttcgatgatattgagcacgacttctgaggtgatcaggtgatggccagtttcaatgctggccattcaaaaagctttgcgacatatccaggctccacacgcgaggctacctcaaggcgttacaggttcattacagttcatcatgaaggctctagcgaaacggtactactgccgccggacgcagctctcacagcactgatcccttttccttctttccttctcagctttggcgatgatcttcgtagcctttgctgcggctttgtccaaagatggtagtttttcgatagcttccaagtaacctgggtcgcgctttctagccggatgagtatctggagtacctataaagtcgtgtctagcagctttataacgcttttgcatccaaacatatttttcaagaacaccagaatcagtattttttaacccagcctttatcaatccagacaaggttttcaaatattctgggtatgcgttgctgtccgcccctaccgtttcaaccacacttcgccatgaaaaataatcgaaaaaccaagaaactttaccatcgctatccttatcccgctttagaaatttctttattacttttagcacttcaaccttgggcttcttcaaggctgcgttaaatatttcaggatcaagaataacgcgaggggccttcgcaaccttcgactccaagaaataggctctattcatggctggccctacgacaactttgtcagtgtgcaggagctgaccataggtcaagccaccacgtattagatagcctcgatctgcgagaattaccactatcaaactgagtttatttacgatctcaaatagagcatcaggactatcgagcctgtatgaaattaccaggcagtctgaaaactgagttgcttgaaagtcaggagcatttccgatattagctgtttccgccgcatcactaagggcatcaaccaaatcatttaatgtttcaatgtctttttctgtggacttaaccttctcactaaatcccaagaagtcgagaaacaatgtcagccgtttttcatattcaaccgcgttacccatactctctcccccgaggaaaagttcgaaccatgtccatttttttggactcgcagtacactacgtggggcatccagatgtgtttttcaaccctgcggggtttctaaatagggcttctcggagggccatcctctatttgcaaaacaacctaaagcttgtccattttcgtcgggaagctctgctcatgagctccctctgcatcccccgaggccgaatcgaccggcatgagctagtttgtgattccccgcaccaccagccactcacggcgtcaagcacacccatgagctttagtctggtgatcggtggtgcagcggcaaaaggtcgccgtgatctccctctgtttgaagcccagcactagcacttcgtccttgctgtaccggaaaccctacctaaagatgcgctggacaccctcctgggcagccaaggtagaaactggcgcggccatgccttagaaagctggtggagagggagccacatagtaagcatggcataatgacactctcatacctcattaacagggagaagtttgtggacaaggatctatttaggcatatgtttgaaacccaaattaagaaagaatttggcgacaatgcctcattcgccacacgagaatatgttcatgatcgaaaatacaggaaacatcgtgtaagtgggagaataataggccacgggccggaaggcgtaagccagctgtacgaaatcgtacatactttgattacagatgaggagcggggtaggatttttcctggcgcatttgacttagggaacttccaagatattcctgcagagcgctgcaaatatgtagcgcttgaaagtgagatatataacgagaccaaaatcgaccccgaggaagttttaaaaaccataaaaaaacgcattgctgatttgctagataagaaatttagtaacttcttttcaaaaaacccatcgaaatcacttaaagtccttaagactctttatagattccagagagactatagattcttatttactctattggcgcccccccataaaaccggtaagccatcgtttgaaatacgagactcctatggaattgatgggtcgaacgaagaagtagaaatcatttcggatttgaagactcatctgagttttgagataccgcgcgagcgtctccgtgcgattacatctgcctacggccagatgcgaggtgtactggatgcaattgaggaaatgcttatccagcaagctgcttcccagtgcggcaacaacctcaaaaagttcgagctgatcgtacaatacatgtcggactgtattgagagcatcctcaaaattgaagatcgagagcctgtagaattaccgctggatgaacttctatttacttacttgattcagctcgagttctcacatcacgtagcagccagttcccacctctttgatgcggtcattgctaaccaaccgccttttgttgagtcatggagcactattggtcagctgatgagtaaccttggctttcaaggcatctctgcgcagcactttatacgcagtacggatgatctcatcaaggacttcacttcgggggcgtcatcattcatcaatttttatagcactatctttgatcgagagatcgatagtgctacctacagtaaagctctaccgctcttcgaaaaactattgaaagtgcacagttatagcgaagcttataaaaacattcgatttactatagctattggggcaatggcgcttgtgctaaccgagcttcatgaaagcactccatataaaccttattggtatggtcaaggtaacatcaccggtgggctagttgaatttctcaaaagcgttcgattcgagcacattaatctcgattcgccggaaggatcaacgcggtactggactgggcgcctggattacttcacttacgccatggtgggtcaggaaacaatcttcaaggcacgattgatcttcaataagactatcaacgagagcatcattcgtatccttgagaccctggatcttgatctattggatgaaaagctctcgcttttcgtgtcaactaacggaggcacagcgctgtagtgagcagaacccgcctgagttgcctcaggcgggttgctggttaaggattgtgacggtcgtagtagtcgagtagctcgaggcccgcacggagcactcgagacacatcgaccaccagacgccaaacagatcgaatgaagtctttcattctattcaccgttttcgcggcgctcaccctgcacaaccgtcgttgccatgtacaggatcgctgtcatccaaggacgacgcgtcgaacgcagtggccttcaggccgacgccggaattccttccggggcttccccaaacccacggggaaggcgaacggtgtgggccactcaaaatcctaccgtccaagcggtgaaccgcagatgcacatccctgtgcaattggacggtgaaatgtttcccccacagctttcaccggacaggccatgcgagatggcgtctgtctggatgcgattctgtagattcaccgcgaaggcctgtaggggactaaaataaatacatataaatcaattagttaacagaataagatgtccagtatgacgctagctgaaatccacttctgacggcactccaagaccatacacgcaggcgcctggggcacgcaacaaaactacggcccagtgtctggagatgatcaattcacagcgatagggcggcgggtgaacgcgatgccatccatctcttccgggagcgtcggaagctgccctttcatccatttagcgtagatgctggcgagcgttccatcggccttcttgcgttgcacgaatgcgttcaaccggtcgagcatggccgcgccttccttccgtacccgcgcaggacagcgcttacgactaccgggaatagatcttcaaggcagcccctcaacccgaccctgatgacgtcttaatgcgattccaaggcggtatcttcgtcaagccatgatcatgtggcccgcctgaaagactgggcatctcaggctacagcttgaccggcttcagggtaaattacacactcgtggcccccccccttgggctgtgatggaaaacatgcttcgactggttggcagctctctcgatatcacatcagccattaacgacttcaggctgtcctaccaccaggacttcgcaaatgtgcaggtggttgcccgtcgatatctcaatgcgcagctgggcagcgcaaatgcagtcctacttgcccaggcgctatatacagctttgcgcaactggggggcttgcaaacgcagaagcccaactcttcgtcccgtcccgcaaatcgaaagtgctctaaagggcaagcggcttcatgaccgcctactcaaactgagccagcatagccttgcggcattcagcctcaatcagcaggagcatcgtcttctggacagcaatgcgccaataaacgatgttggagccttcgacaaggaaattctagggatcctgaataggttggcggatgtgctgtttttcaacaacaccggcatcacttaccccatgaaggccctgctactcatcaccgggttgatgccggcactggatagccaggtaagaggcgggctaactcgagcggggaaagcgggcttcaccggacaacaactcctgccgaggaatgtacagcaaggcgcaggccgtcgaatctgcgagcttccgttttatctggggcactgctggagcctacaccgggaagtgttcgtgaaggggattctggagagcaaccacaaggggctgcaagacacaccaggccgggttttcgacatcctgctgttcatgcagaaccaagctacccggaaccaaatcctcgcctttaaggtggagcgggaatggccgtaacagccattctctcccctaccccaattaagactggagagtggggcagtcgttgtaacccttgtcatcaacgccgaagaatgtcatgcggtcagcctcattgagtggcgcatcagcaatgttcatgaccaccggcaccctagctcggcaattaaaggatgctcagcacgttgtggtcttcactggtgccggcgcatcagcggagagcggaattccaaccttcagagacgcactgacgggactacgggagcgcttcgatcctgcccaactagccacccgcgaagctttcacaaacgacccgagtctctgttggcgatggtacgagtggcgacggagcaaggttaatcaggcgcgtccaaatggtgcgcatgtggcaattgccgagctcgccaggcatgtgccaaagctgaccgtggtgacacagaatgttgatgaccttcatgagcgcgcaggcagccaagatgtgattcatttgcacggaagtctgcactctcctcgctgtatcgactgtgggctcgcatatcaattgtctacaagccctcaagcgctgcctgaggaaggaagtgaatcgagccacctcagtgctgtgcctgagacgggtatgttcgtcctggagtggtttggttcggtgaaatgctactcgaggggcatggcaggcagggctggaagctgcaggtgagtgcgaagccttttcaacgattggtgcgtctgggattgtttacccgggtgctgagctcctcatacgcgctttgggccacggggtaactgtcgttcacatcaatcctatgcgcttcgatatcagcagccacgagcactttctctaaagccctgcttcagtaatgaagcagaggcctacgtcgcgagacctttgacagacctactcgtgatttctaaggctgtaagagggccagctcacatcattagcctgggtcaaaatcgcacccgcgccggcagctgccagaaactgagctgctcagcctctctacaaagatgctgagcagctagtgtaacgctatctattgatggtcagattatatgtttagggtcgaaggttcggttgcctgggatcaataatttacggtcactggcgattggtggcgcggtttcgatttcgagtgcccatttggggattgcgagctcttctgaaattcgctctcgaatacgattgatatagaaagttcgtgtatgaagtaaatgtgtccacagaccgtccccttgtggttcgggtatatcctccattagttcaataccatcaagtgtaacggaatttagttcgctgatttcctcaccatcttctccttcggcgcgctcgacaggggtcgatattataactacatgtttacgcgcagtttcgccaggcaaaaatttcagcctgccgacatgcggttctagctttgatagaatgaagacgactacatcagaatactcttgcttcgtcaccaatgataatggtttctccgcataaccaaacttcagcgtctcgcggaattggccgtgcgcatcaaaatatatctcgaacagcatccccgccagcatgtgctttgcggtttcctcaggaaaatgagcaagcctagactcaaggtttcccatgaattccatggccttctgagagttgccacatgctgcttgataaatgtttctccctaatacaaaccatgatgaaggtggaaactcctcgtcgcgaatggaagagattttcagcatggccggattttgggtgtaccagttatgagattttaattcatctattatctcatttatagttgatggtgcatcaacctgatacaaagcgtctgcgagggcttcttggctgtattgaagtcgtagttctacttcttccattgctggtgcctcaacggcaacgatctcattccctgcatcagcctcaggaatatgaacttcctcctcaggagccgcagttgcgtcattctctacctcagcgattacggtggtatctactagcaactcctgcgtattcacctggattgcagccgccagttgagagaactcagtaccgttgcttcgtgatagaccctcgattagtgtggctaaggtgcagatggtgatatcaggatgtcctgtttttcgcttaaattcggagaccagccgaggatcgattattttaatttccggagctgagttccctactgactttcttacatctctgacaatctgatatctcatcttaggcgcatagacccagtcagatttctcatcgttggttacaaagagcactttggggaactgagccgaagcagcattagatttttcgagtatctcgtaccaaatgatgaggtcaccataagggttttcgtctttgttaccatccttaaagcctgggggcattcggtgttcgaagcgggcagccccctcatgagcggctctggtgcaaagtgaggagaggtcagaatcaaggatgcaagtggataagtggtcttgtatttgctggtggatagttccagcgtcgaattggtgtttaaatacacctagatgtttttctagctcttcgatagctgctcgaaatccatttatataagctaagcgatccccctggaatgacgttctatgtaaaatattgtcatctacaaacagtgcggctgtttgatgaaggttttctaaggcttttttaatttgggtaggttctttacttttgggagtgtacgactcaaggttttttccggtaactcgcgaaagatattcacttgccgcccaggcaggtatcgcgagacgctcattcaaaacggcagcatctgaccaagcaaaaaactcttgccgggctgcttcatgtagtttgtaaaggtaagctaatatgttagtgtcgaggataattaatgtctgcgcagaaagagcgagatccgcaatctcacgaatatgctcatccattgtcttgtcaatttggtgataaccgaacacaggtcatgctccttgaaaactttatagaaaaatttctatatgggccaatcagctgaatcagagctcctcatcttcaccgcgaatccagtggtgatcaggaacgatcattgttccgataaggccatccgtttgctttctcaggatttcctcgtgctgagaaattgccagtgcgagcatctggattgcagatctcgcgacccgaagggcacgcaaggccccatcgataaaatctgagcggttgagatgctcgatttcaggagcctgcctcgcttgcgagggatccccaaggtcatgaagcactacgaatcggtgcgtacccgaattccgcagatccttctgtgagcggagaattccatctatgccgtcatagtcttctgccagctcggccaggccgtacattgcgtatacgcctgcacgaatcagtacctctactttttttgtgagcggagtacctgttttcttgtctgcggaatctctccacaacctcccgaaactgactttgttgggagctaatcccagcttgaaatagtagtttgccgttacggctaccttgtcgagcaggtcaagggctgttcgatgcgccagtatgagtgccgaggtatcagggccgtacattgcatagtcgagagtgtctgcaaactgtcctgtcttcggccagacgctttcatcacttgcacgccatgtcaaatcccgtgctaggacaaaatcgctcttcagcatattgaacatggcaaacaatggcggcggtctgctgcccacttctggttcactctcgagaatacctggaagggtaagccaatcgagcttacccaaggatgcttccacgagttcgacagcaggagcaagtgtaagacgttcctcttctacccacctgatgaatggattcgtgtgctcaggccgagatggcggatcgcttagctcactggcgagtgcttcaaccttggccgctgcgcttgcccccgcgtactggacaattcgctccttatttctaagtgcctgcctggctagcatcacggcttccatgcgcgttagctctgagcagcccccacgcttaaaaagccacatgagatccgatgccgcgcagaacgcagctacaccgttctttggatcaaccttcagagcggcaagccgtgcgtcatgagcttcagaaagccggtaggtttttgcgaacaaattagcgatattcgtccaggcctgagtgcgtaattccacatcggcacctacgtcttgcaaaaccctccaatagcatcgtcgagcttcggctctgtaggcgcgggtttgctcctggtgatctacccattcagactcatcggccccacaatttgcggcttccacgagcccgtttgctaggttgtaggtgatattagccgtcggatataggccatgaagctcgcgatatagctcaagaccctcctcaatggcatcctggcgtccaagtgaggcgccggcattaaccagagtggctgcacgcagggccatcagattaatgcgatttggcccatctagatcgatttcacgagcttgttgtactgcaagtgtgggtgcagcatccaccaaggcattgaggtgtgaggagagctttgagaatacgctcaacatgtctggtacctcctttcaaagtgaacgattcagcgatgcaggcatgtctcactcatccgcaaatgcttccagggcggcgagcagcttggctagttcagtaaggttggccgcagtgacgatgtcatattctcctcgactactcagccgatatacttctcgagcctttttgacccgttccagtagaggaacaacaatgcctgatgctctttcaagaaattcgttaatgtctgcccgtgtttgagggatcttgtagcctttggccgcacttgtgatgatgacgtccgcatcccgaagcttggcaatgccactggatcggattctctggccgttaacctctcccaatccgctgtcttttagatgggccatgatctccgtagtcagcacgtaatccttggtgacgaattcgctttgaaatcttaagaaccgcagaatactcaattgcaggcgctcatcctcatcaggatgctcaccaacccgctcgctgaaacggtctgcctggcggagagcttcctggtgtacctggtagtctgcatacccagactcatttgtcggcggcggcagaagagactggtacttggatggccattcaagcattccaagagtcaggctgcggaggattttcttataggcaagaactgctgcttccgaagctttctcttcgtatatctgagcgactgagccagcgaagaaatctgcaacctgaaccaaaacgttgtccttactggccatcgtctggaaggcatccttatcgccaaataggtcgttcacgaatcgttctgcaacgtagcttttgaggctctcctgaaattcctggccaccatgctcgtctacgatcatctggaggtcagggtatgcacggaacaaacgttcatagagcaacccgttcacgtattttatgaacgaggtcttgatacggaggccgccgtctttgtgaattcgggacttatcaacgacggtgaaatagagcttgaatggcagcacagctagctcgttgaggattcgggcacggcgatctgaatctttgggcttcagattgctagatttgatctcgcctgtttgaaaatgacgcgtgcggagtgcttcagcttgggcataagcagcttccagatctttctctgccaccagaatggagcacacgatgaagaagcccgagcttcctccctttgaagtatcaaggtcggaattcccggactcatccacgaaggcataggttctgtccatgagcttgctccatcaacaacgtgctgagcgcagtgggtcgcccaatggcaaggtggcgaactcagttcgtcgcagtggtagtgcctggagcggggccttcgctgaacgtgtagttgatgacaacgtcattgcggatcaagacgtcgagcgttttctgagtgcccgtagtcgtcaccttcatagtgaccacgtagctttgagcatgggctgagccgttggtgtaggtgtagatccacttctcgtcagtctcgctgacggcgctcttggcgtagggctcgccgaatagcgactttagttctgcagtggtagttttacccttggtgatgctcgctacactggccgaaggaaagtctcggcctgccgtgtagtgcgaagtagcgcaaccgccaagtaccacgcacattcccagaatcgcgatgagctttttcatatccgtccttgatcgtagaaggttccaatttagctggcatcgaggctaaaagccatcaccaccttgatcacctgcgctcgcgcttgtcggcagctcatagcacactatcctgcgctggaactgcagcattgttcgccctcgagatcctctcggcataaggtgccttaatcggcacattaagcccttaatcaaggattaatgtgccattttgggatcactacgccagcattcattcggtgggaagcgcaaggcttgtgatgaagctaatcgccactaaaacgcacataccaaccaacagcgggattgaaccaaatttctctagagcaagtgctgctacagggcctgcagcctgggcgatcagcgtgggacgagccagcagccccatgcgtgttccgtagccatcagcgccgaatagagccaagggtaatgttccgcgagcaatggtcagaattccattacctgctccgtaaagcgccagggctacgaaggctagccacgggatggccggtaaaagtagggcaatacccacccctcacagcaggatggcgatacgagccgaccaggtagggtgcgggtttctttagccacgtcgactatccattcgcctagcatttttccctgataacgacggttttgttgggtgaagaaaacgaccatatagccttccatttctatctcctcagcgagtaccaatcatttggtaggacagaagcccggcagcggtcatcgctagcgaacctacgacgtgcaacgaaattgagccgagcgcccagagcagtctgccttcctgaatcaaggcaaccgtttcggctgaaaatgtagagaaggtggtaagtccaccacagaaacccgtgatgagtaggagacgccactctggacttagtgtcggagatgcggcaaagaaggcgatggccaagccgatgatgtaacccccaaccatgttcgcgaccacagtgcctggaggaatcgtaggaaacagagcattcagcttcatccccaaaagccaacgcaaccaggctccaagtgaagcgccaacggcaatgacaattaatgacttcagcacggagagtcctcctcatcagatctgagtggactaactggcaagcagctcgcgctgaaagaaaatggaaactcgaagggtaagatcatagcctgtcctaaaatggaggacagggagacgcacctacgcaccctgtccagggtcacgtaggcatcatcagcacgaaggcggtttaaggaggaatgccatctcctgtcctgatcctatagcatcagcgccaatggcatcaagagcagccgcatgcaagcgatccgaaggcccttttggctaagtaagatgtttgatcaatgatccaggtacaggccgaccctttgcacaactaggtcatttggcgcgtttacatggatttaaccgataccacttctacgtacttgtacttcttcctagcagccttcacagcctcctgctcagcaagcaaagagctcaacgtatctgcctcgtgaaccaactcgatcattttcccttcaaactcgtttccaacgcgaagcgtgacccgcagcctgggagtaaaagcttttgccgttttcttcttagctgctggagcgaccaccgatttcgcgagcacaacttcttccactggctcctctactgcaggagcagacatctgctcctcgggctgaggcgtaccgaataacgcacgacgcatttcttcttcagttaattcagagttcatagaacatctcaaagggggcggtaatcagctcgacgaattctactaggatggctgctccagcgtgtccactggaagcatgtatgaatcacccgttgctcgacctacattcctagatcgacctcgagcctggcccccttcaagctgggctgcagcttttcgacaggcatggcccgcaacaacttgtcgacaagatgctcggcgtgagcggagtagatcgcgattctgtccggctctggcggcctgtaaggtactaccgcaccgacagatacttgggcaattctcagtatattcagcacgtcattgccaatgtgaagactttccaggtactcgacggttgcgcgggctcgcggctctgcctttgtccatagttcgacaacaatgcggtgaaatcctatggggccaaggtgttgcagagcactcttccacagcaaaccttcttgggacattttcagcctggtgctggtcattcaaaagtcacggctgttcgggcttggttgttttcaaatacctacgaacagtcgcttcagaaagccccaacctttccgcgatctcagcaacagaaattccccactgcttcaatcgattggcctcaatggcatttctagccgcatcaggacgagctggccgcccaggacgtggctttccagttcgagcctgcgactcaatctcaaggtcgatccctgccttcctaattcttgcgagttgcttcgtaagacgtttctggccgtccttgaatgactcgtgattttgcatggaggtcgccatcagcaggagcgtagccggatcgaggtctaggatcccggcgagcctcaccaggacgtcgagtccaatactgacttctccgcgttctatacggctgaaatgagagcgcccaagattgttgatgtcctcttgggacagaccttggcctctacgaattccacgaaccacgacagccagtgcttctgccgcatccatcggtatttccccaaccaaatccgaggataaagccacacctagtagtgtcataacacgcccaatcaggttcgttatgattgccttggggcttatctagaggtttaatagctttaacccatgcgtcacggccacgaaaaagcagccctgtcgtggatcagccaagccatcgtgagcggcgggtagagagggttgaattgtcaatttgatgttaattacttaggggaggccttatggctagcgtcgtagaacccgactttatgaaggggccacgtacaccactggaaggcctgtcgagcagctctgatgcacgagcgctggcgaaccaacgttttcccgaaaagccttactgcttggttcgagactggacaatatttcgcattgaagtcacccgcgacgaactcttcaaatgccatgcagcgggccagctcccgatgatcctgtttgctcacaacgtggcagaggacagccaaggtcgtttcgaacgcggcgattgggttcgttcaagcatgtgcaccggtctccacgaaggtgttgcgttcgagaccagaaactctgtttacgtattgattggccctggtcatgaacagctcgcgagcctgaaagacgttttctccctcttctaacctgcgctctatatcggagccccttcaggccaaggacatacgatgtttagaacacacgacgccgacatgctgggcctaccgggcatgttcggtgagggtcagtaccaatggcatcaggtatccaaagtgcttcgtaatcactggtatcacgtaactgtccaggccatgtacgaggacagaatttcagaggcgattctgatgatcgacagcgaaccacggcttcagcaactgctgattgcccaagacgcggagacgatcatcacagaggtgcaagtagtcacacctgcccacatgaatggcacgggagtttggcgcatggagaaactgaccaaagtgacgcttggtgaagaccaacacgagtgtgttgtctgcctgctggaggtcgagacaggctccaaatatcacagctctcaccaacctggcttcaacactgatgtgctgagcaatcttcgtccgatctatcacgcgaacatgattcgtacagcctgagatttaccaagaatcccgcacgatatcagcgcagatgtttccgtgcggatttcctggtaacgccatacgggctgcgaaaggagcgcaattatgctgaacactctggatgtggattttcatggaaaacgacatacggatttcgatctcgcacgaatcctaaaagcaaaagcgcaaggcttcgaaaaaccgataacagcctatctctgcggagtatccataaaggctcgtgctggattaggcgtcgtgtttggtcacaaccgtaaagaccaatatggacgtttcggcgacggtcacctgatccggacttctgacgtgattaaggcggagcgcgagggccgattttgggtacttaccacagagaattcacgctacgtgatcgcgacgtttcagcacggtaatgggcgtgcgagtcttcgccagtttctgcgattgtcagacggccaacaccatctttccccgcacttactgcagtagtggcgcagccctcaacgccctcattctgcggtatgcctttttcaaagcaaggcatcgaaacctggtgtcttgttggaagcatggatgttcagccggcactgcagcgccataccgtaagctgtctccagatgcgtagccagcgagccacccatttcgatatgttgagataaaaccacctggtgatctgcatctgtaagaacattggtgaaaatgagccaggaatgcatgtgtggcgttgtctgggttatcgcttgagcaacactttctgagagagctctggccttgcgatcatcagtgatgaaggcttggcggattctgcttgcgaaggcgattgacgacagctcgccttttccgagtttttttcggctttcaagggctgcgatggcttggagatcgtcaatgctgcaggaatgggacgcgaatttgcccttggtctgctcttgcttgaggcgctctctcaactcgaggtctgcttcggtggcggctgtgcggggcttgaccaggcattcgtataggacgaatccagtcatgcagaactcacacttggcttcttgagctgccgcatacagtcggcgcgaagacaaaatgttccacaccgagcaggtgtcggccacattgatcttgtggaatttcgatggatcaatagccatgtattgtccttccatatagagaggcaagtgctgccagttcgccatagccgcagagaagagcttcggccagcctgccgaggctgatgatgccttggctatgtgcgtccaggcaaagcttcacgtaatggtcggacagaccgcgttcgagcagagcgacttttctcgcgcgttgctggagggtgaggctctcaggtagttcggggtctatcttggcttgtcgagtaacacggtaacctcggattcgtcgactggtatcaatgtcggctcgcttcgcggccttcaaggctatacccaaggcgtcacagctcactcgaaacttattagcccatccttgagcttcctcttcagaccaagtagttgggtcaggaagcaagctgagcgtttctggaggcatgaggtaacaggaggcgaacctattcgcccgcacctcctggatgtctttgtctcccgggatggttacgcttgctccttcttcactatcaaaaatgcagtgagccatctcgtgcgctgcactgaatcgctgtcggtaaacgtcctcggtgtagttaactaaaatgcatttgccggcgacggggtgcatcacaaagaggcctgagattttggagttgtctagctttcgccggaacacatgcacaccgactgagcgaaactcggagtagatgtctcggggcacctctcggtctgcatgacccatttgccggcgaaatgcctttgccgcgccctcggcatgagataggaagtagttaccccgtggggtgtaggcaaaggtactgacagcaccacggagttctcgggttaaaaattcttcggtttcgcagatgtacagaaactcttgaatggcagagcgatcttccttcgagaactcacggccatgcgcccggtagagcgtttcagtttgctcaaatggggcgacctgctcgtttgaaataaagaatttgaagtcgcatcgatagtagtcggcaaggatgagcacctcgtctccggtaggctccaacgcacctttctcgatactactcaggcgctcaacgttgattgctgtgaaagctgcgacttcgtcaacggttcgctcaagctgaatacggtagcgttgaagcttgtcgccaagggcctggagattcatgcgctgtttgacgtcctgttaggcaatgcaccgagacatcatagtcggttttcaaggcgctccacttctcgagtccacatctatatcgctttattggagcttgaatcgccggattgttagttggatcgctgagggtgcgagtcttccccatctcaccattcgttgaggtagcatcagcagcacaaactgcgcttaccagcccaaaccgcgctatgcaatttccaggaggaagtccatgtccgacgaatctagtcgtttgtctttgtttgaagaggactatcttctacgtgagcttgggcctgtggcccatgtaccgcaggtggcgcttactgagctggtcgcgaacgcttgggatgcaggcgcaagtctagttgaactgtttcttccatctgaactgggtggcaccttgactgtgatcgacgatggtcatggcatgacgcccaaacagtttagtcggcgttggatgacgcttcgctacaaccgactgaagcatcaaagctggaaagtggagtttcctaaagggaaggatggtaaagccagaaaagcttatggccgaaatggtgtcggtcgccacggacttctctgtttcgcggatgagtaccgtgtagaaacatggcgagatgggatactcagcacatttgtcgtgggtacggaatcagggccgagtccatttgtggttcgctctgaagagttcagtgagcgagagggtgaaggcactaggttgtcggttgtagtcaatcgcaaaatgcccgaccttgaagaaatcatcaccgttcttgcagcacgcttcatccacgatcctggatttcagatccgagttaatggaacccccctgacgttagcaaagcttgagcagcacgccaggtcgcacacgctgaccctcagtgaggggcggacggcgaaggtgatcgttattgattctactcagcagaatcactcatcgattcatcaaggcgttgcgttttgggtagatcatcgacttgtcggtgatccaacatgggctatcggtcaggtagcaaatttcgatggccgaactcgattcgccaaacggtacaagatcatcgtcgacactttgggtttcgaggatcacgtacttgcggactggacaggatttcgtacaacgccagcagtaaaagagttgtatcaggctacagccgaccacatcagtcaggttgctgatgagttagcagcagaagttgtcgagtccacttcagaagacgctcttgtccagaatcgtgctgaactcaagtcgttgggccagggggcgcagctcgaagtcactgaatttaccaaagctgttgctcaggcgcatccgatggtatctccggagtttttggcgacagcagtcaaagcggtgatcaatctggaaaagtccaagagtggggctgcgctccttcataaactcgccaacctagatacaaaggatgttgagggactcgatacgttgttggctgattggtctgtcaaagacgcacttcgcgtgttggatgagatagatgacagactgagcgtcatagaggccattgctaggctggcagaggatccgaacacagatgagctccacaccctccacccactgatcttgcgatcccgctggcttttcggcccggagttcgaatcagtggaatactgttcgaacaccacattgcgaagcgtagccaaacagctatggggcgacggggacgcatcgtttcagaacgagaaaaaacgcccagacgttgttgtcttgcctgatcgcagcatggtgcagctggtgggtatagagcgatttgatccgcaagacccgaccatcgcgcagatgcagaacatccttctgatcgagctgaagagagggggattcaaaatcaagcgggacgaggtcaatcaggccgacggttatgtgcaggatattgctaattctggatatgtaaatggcgcgccctttgtcacggcctgggtggtcggacagtcaattgcatcgggagtgggtaccgagaaaactgtaggtgatgactcgcgcaaatatggtcaagtcagagcaacgacttatggggcacttgtgggcacggctaacctgcgactgatgcgcttgcgtaagacgctggaggaacgatatgacaacctgccaaccgacacgttgctcgctaaggtgttatcgatccaagaacaggcaacgctcgatttaaatacgtcaaacccagtgcaacatcaggatgagagtgctgcgctggcagtcgctcagtgaagcatcgtatcaatctatgggttgattacaggtattagcgccgtcgcaattccggcctgtcgtcagcatcatagatttttccgcctgtgctgaagcaatcagcaaggctagttttgccaaaacctaatgaaagataccttcaagccggtgtcaaatactcaaggactctttgtgccttcaactctagtagacattatcatccgcgaccgaggcgcgcaggcttataccgattacgcggagtttcaaattaccgatcctgatgtgatcgttagtgccgctaggcaaacgctcgaatcgatccctccatcatttggttcttgcgtcatggtcagtgctggcttcactgcaattctcaaatctcaagggatacccgcagttgtcgtcctgggagacctgctgattaacggccagtatgctttcgaatgcagggggaacattccaggggcaacctacgagggagagtttgtggacgccaagtgggacggtcacgcttgggtaatgctcgcaggtgtcctctgcgacctgtcgatcttccgaagcgcctacgccactaaaacgccaagcaacctcaaaaccttcatcagccagcagttcggtgagggtaagggagcactgatgtgtcctcacgatagcttgccggtcggcatggagtttgtgcccaaatttgcgctcaatgacgatcagattctggggattctggacggtttgtccaggcaagcacttgagactaagtgacgaaattcgaggcggcattcccggctgtgtcgggagctgaatacggctagaaaataagggcggcgctgacatcagtgcgagattagccaggcttccattttttgcagtctgcccatttcgagaagcttcggttttcctaaatctaaaagcatgagtagctcttgcctgcactctggtgatggaaaccattcagcgacctcgacattgcagtgcctggactcactcagggcccatttcacaaccatgtccgctgctgctcggtagtgatccgccatgaagagtcgtcgcccctctgcaaaccaaccaagcttggctagttgttcagtgacgtcaatgacgcccgcgtgatcaaaaaaaccggtggtgtctggatagtgaatacctgccagagacaccttcgccgcccccgcttctcggtcgaagtaggacagaaaatgccacccacctgtagtgcttccagcgtgcggaaagttgatcgcggccttgccagtgatgtagtgcgtgcgggaaacgcgtttcagatcaaagtcaaatagcggctggttcatgggagcttgctgagacgcgccaagccttgttttatgtggcccgcgttttcgccaattgtgtagagcgcgccacgaacgttggcgccgacttcggcatgtccctgggcttccacctggagggtcagttccatgagcgcagcttcgagagcgagttggttttggtacatcctttccaaaacatctgacagcgagtattcaccgggcatctacatggactcctttattacgacgcagcatagctcagagatgagtcagcaagtgtcttacgggtagctcccggtgctcagcaactttgaactaatcatgacgaccacgcccctaaccctgtgcagatagccgctagctcaggtcaaccctgagcatcctatttacatacaaaggtttggtgaatcatgaagagcgaacaggtagaaggcgttgtagaaaaggttgccggcaaagcgcagagcgcagtcgggaaactgtttggtgattcgaagcttgaagccgaaggtgcgggacgctaggctgccggtcagttgacccaaacctatggcaatgcactggacagtgtgtctacgttcgtcaaagagaagccggttgctgcgcttgcaattggtgcagtagccctgctggtactagaccgtctcctgcgccgctgaaggtgggaggaaaagccttgagttgcttctcccgaaatcgtctctcgtactctccagggctatctctgaagggtgcgagggctatagggataccctggagagcactttatgagcgtcccgtccctcagtagtctcgaagtgtttgatttgcaagctggcacagcaatgagcccgaaggacagagatgccggctagacgcttggtcggtttttattgatccgccgtaccggatttatcagaggccgggcctccattgaagctaaaatcggtggtgccgttggtgatccattcgaccagcttttccttgtgtgtgtaagccaccactccacgtttttgagtcggatcgaatcttaagacgcgccatataccaaaatcggggccgaagtcgatgaacacgggtttggaaacccaccagcgagcaaaaagcttgctgcgggaatgccagctaaatgaagccagtccattctccgacacttttgacaaacccattctgaagttgtacctgtcgaactcagttcgcgtgccatcgatcacccagatcatattttgatagtagttttgcctcgcgatgacctcttcaggatgtattgtcgatctctgaaactcaataaccatccctgaaggcgttcggacatctgctatatgtcgctcccctgaggacgcttgcaacacaacttcctgccactcggttgggaacatattcttccaatcgcgatgccatgccgtttccgtttcccaccacggatcgcaattgtccaaacgtttatgagcccaatgccagacgacatggttcccgcatttagcgacggtctgggaaccacaaaaactgcaaacaccacgtgcttttggagtggcctctacacgagcgccttcaagcaatgagtatttcattttcttccttgatgctaaaaatgggggggcggcagctcttaacttcctagtcggcagtaccttgtaactcacaggacgaaagacaaatatctgagcacggaagtcgtcctagcagcctggcaggcctgcgtaaatgtctaaagaggcgggtggcggagggtgccccacttaaatcgccttcaggagacgctcaagcgtttgatgctcccatgtgctcagcatagcaatgggatctgtgccaaagcgatttcccgagtctaaagaccagcgccgtccgtcagggcttatgcactcttcgcagtagcccagctcatcgcggtcgttatgaatagatattcgccaaccttcgacattaactttgaagcgctccgcataaatttcttcccatcccctctcgcaggctctgaccataattaggcgcccaagagctacctccctcagcacttgcctgacctctcgcgctgagagtggagccccttcggcagcgccatctagctgcgacgaacgagctgccgctctggcctctttcaacaattgctcagcgtacatagccggatcatcatctggcagcgggtagcctgcagcagatagagcttcggcgcgctcttcaatgagcagacgctcgggatcgcgaaccgtttggtaggctctgcctggtacgcgtcgagttgtgtccattcccggctccccagaaggctgatgaataagagcgactaaattacttttagaacgataacagaacgcttcgaatagcgatgccgagctccgaatcatgagggtaggatgcattgcgatctatgcttcacataggctcagacaccaagcaagcggagcgcgcaggcgtgagggatgcgagcccgcaggggcgagacacgccttggcggggctcgattcacggcagcctgacgccgcaggcggcacgccatcaacgccaacaagagataactcaaatgcccgacgatgaactccgcgaactggaggccaagagacgaaaggctttgtggatgcttgcgaacctatctccaggcgattcgaaggcgttcgatcccttatccattcttgatgaccttgaacttcaagagcgaaaagactcccctcatgctgacaaggcacttgagctcaaccagcttcgggattgtgtcaccgtgcagtatcaccacgccggaattgacatcattttggagcagactatcccccagccctggagggagcgcttcaatcaggcgagtatcgggtcgaccaaattgttagatgggccttacgctgcggactggtataaattcctggcttgctgggaaacagagacgcaacacctagaggcacacagagctgcctgcagtaaccccaagctggattgatgcagacggagaatagacgtggaacgagacggcgatgacaccgtgtactgcgatatccagatgccagcagccgaaggcagagagcttttgcaactggtaaacaccttactagattcgaaagcctacccgagcttggacaaagttttcgagcacatgcagtacgagctcagcacatcgattgatatcctggataatccgcaaaagttgggccgatggcgcccgacacaacactgactgtaggtgctggcagcatgtcgtccagaacaccgccatcaagcgtggagctgagttcgtaacgaactgcaggtatgttcctcggattgatggaaagcgaagtaatcagtgaaaatttcgatgctgtgccatttgattttttgcaaatgaattagccaaacagtggcatactgcctttatttaaacgaaaggaatcgtagatgaacactcagctaacgcagtctcaggcagatcagattgacttagcactccataagaatatctacccgaggttgggaggaggagagcttacccaactggcgaagctgtttggttctaacggacttttaaggacgctgcgtacggttcttcgtccgccaccgccacctcaaccgttaaggggaaatccacccaatgtgtccgtaacagttcaattggcatggatcgacaaaagaccatatgcactaatggatcgtgaaaagcataaagttgaaattgctgatgttgctgttttttattttgatacaaaccggtggagcacgggaagtagcacgacagctcggtgcctgcttttacaggccaaagcagttaagactgcggctcaactatcggcacccacagtttgcttaaaccctcccgcccctaaatcaaatacaaccactgaacgagagcttcgacttttgtcgaagtggcctaagtttgatatgtatttgggctccaacagcaacattccccttgctactaacatacaggttcccttctcaaccagtcctccgccgatggggtggtttatgggaactccgatgatcagaccttccagttcacaagttggcacctgggttagcccatggatgtgtgctcctgcggagcagaatcacgcgtgtaatgaaacattgggaagtttactgtgtaggcatttttctggaggccagtcatcgaacataagcaagaggcccatagatgcgggcgctcccttcaactacgctcccgcctcccttaatcacggaaaccccacgtctaccaattgggatcggctgtgcatcgagatgatcagagccgtaagaggccagataatcccacctcatttgacaaacggtgcgccccaaaaccggttgcagcgggctgtgatgtactcgttcccagtgtggcctgcgcttaaagtgcttgctgcaaccgcactaaatatattgatgcggtttagcaaaaaacgcatgccgattttgattgtttcgcgagtatttgacgagacaccttagtcgtagtcgatttagttcgctggaggtgtccatgcgatctgggctagctgctaccttgtgaccgagatttacaggattcagttggctcagccgagtcatatcaggctgagcgactgataagaaaagctcgttcccgagatgctccttccccacgatcacgaccgcctgcatcggtttgacgagagcttgagcagcactgattcaccatctgcaatgcctcgggcagcgcggatatcggtacgtatgtctatcggctcgaagaccggttagatcacattgacgggaatcagtgagtgatagccctaataaattgtgcacaaatctcaaaatctgagcttggacgtttcccgtgagtgcttgcccgcccaacgctttgagctatcaacgctccatgccccaggcatccatcgcctcagtgacagtcgcataccagtggagctcaccaacctgtaaggcattcgcgatttgcctgttggtattgccgtcgccccaagtcgggagactctccatggctcctgtgaaaagactggctgtagcgacagcgaatcgccccgtacttgtagactggaggcacacgtagcgcaatgcagcgccactggaaagcctacgccaggccacgacctcaatgcagtccattggctccacaggagcctcgacggcgaaacccgcgccctcatccgccctatggctctcagatgctcggaacggcccgccaagcgctcttgggacgtgtacgaggtgcttcaactgctcacgtgcggaggcaatttgctcccggaactcttctggatcaatggacatggccccttccggcgtcaccctaagggtctggaggctgttcgcggcttggatgaacgcaagttcgcgctcaatctcacgctgaggacggcggtcttggcggatgagatcccatagcgcacggactattcgcatctgactattctccctggtatcggtaaacccacaccggcagcgcgtgaaactgtgatgactcaggttcacaagccgttccggtggagcagcaacactactcagcactctcgcggctgcttagccgcatttccagcttttcaaccagagctttgacgcttcggatctcaaccgacatatcaattttttgcagcttggatctatgctccagagcagtgagcgtgtctttaacagagtccagttcgtcttgggtctcaagcatcgaactgtaggtagaactcgaggtgagcgccttatattcagcgtgaaaataatgatggagagaagcagggtcagagtggccggtgagttgggccacctctgcgcaaacatcgtctcgcagcgccggcgtccaccctttctttagagcgggggtttgggcgaatctttcctccagcctgatattgatttgacgcgtgacaaaacgatgtctaaacatggacaggcaaacacgggtacctgacaaaccagcacctaaacacagtcggtcaaactccttagtgattgactcttttttcagtcgactaccgttttcacctaggaatatattgttgggctggtcgaaaaaaatattacgatctgctaggaagtcaatgtaagcgttcctggcttcaacgtaaattgcaaaccgccttgcatctgcagcattgattttaaaacggcgtaacggtgccggagttccgcgctttttagtggggatcacaatctctagtgtattcgaaatgttttgattgagctgaaggtcgaggtcaaatagctcctcaggacgtagtcctgtgagtttcatcattcttaacgtgaacatccgccgctcgtatagatacacactggtagcatcgtagagtttgaggtcactgattgatttaagcttggagctagcaggcagatcctcccagtctcgcttccggaaaatctcatcctggattttttggatgatgtgttcgtctattgccaccttgtcatcgttgtacggcacgggagctacgagcaggggatgaaccatgtaggatcgcttggttttgggatttatctcataagatatcgtgatatttgcaccactattctttaggcctaccaacggcgttttagaaagatctggatagttttctgttagccagtgcaaaaagttaagcgtggtgtgctggattagcctggtgcgattgttattccttgctggtgcgataccacgaagggtagacctggtttcttgaactagctgttcagtaaaatccttaaaattagtttcgttgaaattgctgaattgaatgctcttgacagagcaaaagcgaatgaagtgcgtgatgagcgctgcgtctaccctcgcagaatctctggcgcctgtggacgcgcagatctcagcgatccatagattggcaaggttgcacggcctaccgttaggccagcgaataagtacgaagttttcgatagtgcgtggctttccaatgaacgcctcagccttccgaatcggcatagctttgtctggcaggcttacggattcatattccgtgtagagttgcttacccatcctttttgccgccgtcgattaccttcattttctctgaagaaaatatctggtcgcttatcaggaaagattgatatttggccttggatgttttgactttaagtctgatggttgcgcggatttcgtcagcgctacggttgctctgagggtcaatacgctctaggaaagtcaggatgtcaaagtacgccatcgaggcgatgtgagcctccagcagcgcgatgcgtgcctgatccttgtctgaaggaaggttaggtgcaggcgccgggttaaccttgggagtcaacagggcaaatgccctggatctcatctgtagcatgttgtcccaaaggcttgacccagagatgccaaactgtgcgaccttagccgcttgcttcagggagttgagcgaaatcgatgtgaagcagccagcgacatccagtttgcagaagcctcgcatcgaggatagggctcgaagctgggctttcgacggtgtaatttcttcagatagcacctgtgaaagccaagtgtgacgagagtgaagatttttatttgttgtatctctcatctttttggcctcctaggcaaatggcgaaatcgatggtgtagatttcttcgtcgtaagattcaagcctgaccttatatgtggtcatatcgaactcaggttgttgcaccattttgtctaggtatttgagcaattccttgttgctaatcgaggcgatgctggtggctttgaagtgcttcaaggcttctatgtaaagcgctagaagcccttggtttgtatctttggacagcaagccgttttcaagagcaatgagcttgtcgtcgatgcattcggattcatatcggacggcttccgaatctgacggttcataatctgtgtaatcatcaatatgcttcctattggagtgacctgccatatacctcagcaattctttccctgaatctcctacgtgtctatgtacgagcaggaggaagaattttctcatctcgtgaatgcgcacataccatcgccgacctattttatcgacgggcagttggatagcatcgcagaaagtattaatgcacaggtttactttccattcgggaatttcgccactagggcatttgaatcctctgcccggaatataaaacagcctccctgcgtactctgattcatctccatagatatctgctagcttttcgccgagcacttggagtagctggatggcatgggcagcaacgtagggaatagggcgctcaatgaagtcgtttgcacccaactccccagttttgccaaccatgtggcccataaaagcgccattgttgccccggtcagtagataggcagttacgttcaagggtactaagctcagtattccgaataggttttacgatgccgataattatggcgcaagcgccataaaaagattccatcaccattttgtagttggttttatctacagggaaatttttcttctctttggtttggagcctgcttatgttgagcgcttggaatagcggctgggcaggtaggttttccatacctctcgtcatccaaaggtgttttgttttctggaagagctcgttcttttttacggactgtttcgacaatgaattgtcttcgtcaatagagacgaattgctcgatgtaaaaaatcagagactcaactatggcatttccgtagacggttatccacttgcaggcctgattcaggcatttgaagccaatatcaagaggtagcaatttggtgtggccacctggcttcaagtgtggcttgtaatcaagaacaagttgatcaatgttcagcttaatgtcggggatgtcttcgggcagaatatcatggccttggaaaaataattttaggcacgacattgtatccataaaagagctgatgcccatcgccccgtcagctgcttcatctattgtcttagtattttgagtgctgtgaaggtttgctcgtacacctctttgtagtaagtcgtcatgggctaaggccggctcaaactgcctaatgaacagtcgaaaatttgcattatgcagagacgttgaaggtcgaccgagaatggagccaataaagtctcttgacagcaatcctttatcataggtgctgttttgggcgctggagacatagagatcgtttcgagtaaagtaggaaatcgcttctcttgtgagctcaactggcagggcgtccgggtctgatataagatcttctaatgagaaggagagaggtaaaatatcgagcaggtgtgaaatgaaacgctccttcaacaacaaagcagcagtccatccaccctgactgaaagtttcggcgatagctttgcaggcgtcctcatcgaagagcctgaagccatgcgtactggtttcataagtatctttataaagattggcgcgtgccgccaaattcatagcgaagctaaagtatgtgatccatcgaccttccgcgactggtttacctgtaatggtgcccatgcgacagtgaaataaccatttctgcaccgtttccagcagcagcttattaggggcgtcggtgaggttggtgccgtccgccatcaagcgatcaaagctcatgcactgaagctttgacccacctggaaaactgaccagccattcctgacttccgatcccacctcttaccagccaatctgcttgatagctgtggctccttttatagattttgctttgccgttccgcgtgctcgatcatcgctttgatacgacgttcgtcgaatgaaaagtcttccattagatggccttccaatcggaaagggagactagcggacgaaggtcttgcttcaggatggtcgcacgagcatgcgattttcggagttcactcatggagtcgcccgaaaccctgcccgcaatagccatctcagcgttagatgcgctatcgaaatcgagggaaattgttttcgctactaaatccctgagcaccgggaagatccataagggcacgctagttcgctcatcgatcactaagcgttcttctggtgcaagcttatcgacggcatctgcgtatgcgtagatcgcggcaaggctacccgcactccgatcaaatagcagctcgcgctctacaaacatttcaattagagagctggggtcaggcgagtaatgacccagcttcgagcgtaaggcttcgcttaagggatctcccttcttaaggcctaatagtatccgtcggacaaaagcctgtagctcttctcgagtgctaaagtcagatgcagctaactgccaaggctcgccctctgttgctactaagatgaccttttgatgtagcaccctgaaaaacctcgtcgcccatcgatgaaccatccaggccggaatatatttatctctgaccacctgcaaagagttacccagcatgtccgctacggcctggagactaccagtacgcaaaaactccaaaatcccttgagtgcatcggatcgtgtagagattgaccatgcttggagttacgcctactttgtctagttcatctttatataaatcgtgcagagagagtccggcatttgtagtcaaggtttttgcaaagttaggactggagccaatttggtttctgctcgagacaaggaacagcttcctccacccgctcttaccctccgataaaaggcgtcgtcttggcatgtttgtacaccgaatcacatccataacgatccgagtgctcaatgggggaagtacagagaccttgcgtgactgcgcgcgaggtttgctaacgctgactgttattcgcttgttgtcactattgccgcgtaggtagaattttccgtctcgtcggtataaccttatgttggtcagtgatgatggattgaacgaaggattttctgatgcaatgatcgcacttgcaactgcgcagtctctgggtgacaagtagccgagtagtcggttgaaagtttcgttaactgtattgttatcgatacagtcgtcgccggcagcctcccacagtcgtgccctaagttttggcttgctatgggagttgtagattacgggcctgaagaaaggtagttcttgcaggtcgtcgaatgtcatcgatttaagctcgtcagtctgttcggcgtaatatcgagcgacggctagaaaccagttaatacctgtaggcgaatctggatgcgcaagatgaatcccatttctgctgaattgtccgctctcaagcaccgcctcgatttcgtcattcgagatgttcttacatagctcatcacctcgggcgtggcatcttagcattcgattccagtagtctaccgagcattcgacaatggcatcggcccttgtctcgagagtgttcttaagattaagtaggtacacgtcatcttcaaaactcaagccttcttccacaaggtattttttgggaagtagaaatcgtggccctttgggaataggcgtgtgcacagtcccgtaaccagccggttgagacatattctccgggtgactgacggagttcgcttttgcatctgggatgaatgtgtcttccggtataaatccatcccgcctcagttttttgtaaacaaacgccaccgcgttccaatggtcatatcgggttttgggcttatgatctttgttgtagaggtgatgggagtagtgtgtaagtatgaagttgctccagtcatcttccgcaggtgggaactttaaccggagcttggcaacgtggttgaaaatatatctacttgcccggaagcgtcctgaatagctagtagtctctccagtgatgcataataccctaaccgcatcggctactttatagagcacttctttgtcgacccacgatggagtgtggatggtagaaatcctgtagccgcgaatacattcatcatcatcccgcttgaatatgatgcgatcatcctgcacttggtaggtaagcataatgagatcctacgttgaaagcggcatagcgtagtgatttggttgctctggtcaagaactttcgtgcgtgcttctaaagttttaaacagtgtattaaaagcatactcttacatgtatttcggggcgggattttgcattaatctcacgtcgcagtgaaaggttggccgacaattgatatgttgtttggtatatctgttggtctgtttttcgctgataaggaattgccggcgctggacgctgatcagcgaatacgccgggtggcaggattaggctggacaagagggttcgtcgttatcggcatacataagcgtgggtgagtgcaaggaaggcggttgctccttcccagtgtacttagttcctagggagtatttcactgagcgattgcttggtcatcctcaaccaggtggtctctaatagctctttgccgggattgctggcggggcattaattaaagcaatattgacttagcgtttgaaccaattatcgatttatctcgtcgccgtgttctacggaatacaagcactacctccgcatatatttagtccggttggtgttcggcccctagcttgtggtatcgagtctaatgttaggctccgaatcggcttgaatcacgtccagcgcaaccgtgatttttttcaggtgtgactggacatcccgcgcctcgccgcagacagcactgcgatatgcgcctgctgtccaccgttgagattggtgatatgtggggggaggcaaaggcgatggacggtgcgctagggcttcccacccgtcaatccgagatgatgggcaacctggccacgatgaactcatatcgatcattgtgagatctctcttccgttctcagcctatgggaggtggtggagtgtcgatgaattcagcgttttttccgtctggggtatccgaagcacatggaaatgggtgtcaagttttaggtgtcaaaatcgttttctaagctgttgattcgtatagggttacaccttctagatgaattcatgtgtctagaaaaggattttgctcgacatcaacgggattctcggcctggccgcgctgatgggcggcatcaagcatggtgaacagtcttacaacgacgattcggcacgcacctatagcgtgatgatcctcaccgccatgggtgtgtcgatggtggtgccggaatttatccccgaagccgactggaaaatttactcagccttcaccatcggcgcgatggtggtgttgtacaccctgttcctgcgcatgcaggtggggccgcacagttatttcttcagttacagctacccggaaaaacgccgcaagaaactgccggaagagcaggaggagccgccggtcaacctggcgttttccatcggcaccctggtgtttggggtgattgtgatcggcgcattggccgaggtgatgtccaagactttggacctgggcctggaaggtacaggcgcgccgccggtgatcacggcgatcgtggtcgcggctatttcggcggcaccggagattctgaccgcgttacgtgctgcgttggcgaaccgcatgcaatcggtggtgaatatcgcgctgggtgcttcgctgtcgacggtgatcctgacggtgccggtgatggaggcgatggcgctctacaccggccagccgttccagatggcaatgacgccggtgcaaacggtgatggtgtttatcacgctgattgtcagcgcgatcaacctcaacgatggcgaaaccaacgccatcgaagggatgacccattttgtgttgtttgcgacctttatcatgttgtcgctgttggggctctgaatcaccgagaaacagtgtgggagggggcttgccccctcccacatttttaatcggcgtctggtctaggttccggcgatcaactggcgcgccgcctgggtgtgatcggcgatcaggcccttgaggtccaggccttcgacctggccatcgatcacgcgccatttgccgctgatcatcacccgatccgcgcggtctgcaccgcatagcagcaacgccgaaatcggatcatggctgccggagaaacgcagctcatccagcttgaacagcgccaggtcagcctgcttgcctacggccaattcgccgatatccgtacgccccagcaactgcgccgaacccttggtcgcccaactcagcacgccctccggggtgattttttccgcaccataacgcagccgctggatatacagggcctgacgggcttcgaggatcatgttcgacgcatcgttggaggctgaaccgtccacacccaggccgataggcgcgcccgctgcgagcaggtcccgggtcgggcagatgccggaggccaggcgcatgttcgagcttgggcaatggcagatgccggtgccggcggcgcccaggcgcgcgatttcatccgggttgaagtgaatgccatgggctagccaggtgcgcggtccgagccagccgacgctgtccaggtagtccacggtgcgcaggccgaaacgttgcaggcagaagtcttcctcgtcgagggtttccgccaggtgagtgtgcaagcgtacatccaggcgattggccagttcagcgctggcttccatgatttccggggtgacggaaaacggcgagcagggcgccagggcgatctggatctgcgcgccgtcgccgcgctcgtggtatgcgcggatcaggcgctggctgtcttcgaggatgacctggccttgctgcacggtctgttgcggcggcaggccgccgtcggcttcacccaaactcatggaaccacgggtgagcatggcgcgcatgcccaactcgcggacgctttccacttgtacgtcgatggcgttttccaggccgtcggggaacaagtagtggtggtccgccgctgtggtgcatcccgagagcagcaattcggccagtgcgactttgctggcgagagcgagcttttccggggtgagccgtgcccagaccgggtacagggtcttcaaccagggaaacaagggttgattgaccaccggcgcccaggcgcgggtgagggtttgatagaaatgatggtgggtgttgatcagcccgggcaggaccacatgttcacgggcgtcgaacacctgcgcgcagggcagcgcgggttcttggccctgggccaggacttcggtgatcacaccgtcttgcagcaccaggccgccacgggcatcgaggccattggcggtgaaaatcgcgaggggtttttttaaccagatacgggtcgcaggcattggccggctcctctgaatgatgggttcaggtttgccagctcagtgttgccctgtctgctgatccagggtcgccggtgaaggcgagggggcagtctacgcgcggatcgttatcgacggcaatcggtcgataacaatcccgcaccgcttaccaggcgatggtgtcgcctttgtagtcgatgaagtgatggccgcctttgccggtgtaggcgttcacctggtcgaccaggccgcgcacgctggtgtcgacatcgatgtgcgcgttttcgccgcccatgtcagtcttcacccagcccggatgcagcgacaatacggtcagtttgtgatcacccaactgagtgatgaagctgttggtcatggagttgagtgccgccttgctggctttgtacagcgccaggtccgagccgtcggggatggccacgctgcccagcaccgaactcatgaacgccagcacgccagtgtccttgcggatctgcccgacgaaacgctgagccaggttgatcggcgctacggcattggtgaaaaacagttggccgacttcggccagggtggcgtggcccggctcctgattggcagggcccttgacgccggcgttgacgaacagcaggtcgaaggtgctggccttgaggcgttggctcagggcgatcacggcttgctgatcgtccatgtcgagcttctcgatctgtaccggcccaacggctttcagcgcatcggccttgctcgggtcacgcacggtggcggtcacgtcccagccgtcctgaagcagttgcttgaccaggccgaggcccaggccgcgggaggcgccgatgatcagtgcggtttttggcgtagacatgaaaagcttcctttagcgtcgcggttcacggagttcaacgttgtagcaggatacgcccacggctgaggtcggcgagttgaatttgcagggtgtcgatatgcgcttcgcccaaggccagttgcagctcgacgccgttggcggtgaaggtttcttcgaccaccagtccacccagctcagccacacgcaatttcaccaggttcagttcggcgaagccacaggcgcaactcaaggggacacggctgatcagttcgatgcggtcggccgtttgcaggcacttattcgcgccaccgccgtaggcccgggcgaggccgccggtgcccaactggatgccgccgtaccagcgaatcaccagcaccgccacctgatcaaaaccctgtgcctcgatggccgccaggatcggccgcccggcggtgccgccgggttcgccatcgtcgttgctgcggtattgatcggccagtttccaggcccagcaattgtgcgtggcgttcaagtcgctgtgttgctcgaaaaacgcctgggcgtcttgcgggctggtgatcggtgcggcgagggtgataaagcggcttttgcgtatttcttcgcgaaactcgcaaaggccggtgagcgtgaaaggcataagtcgcttcgtttaatgggcgggcttgatgccgcagcccttgaggatgatatggatcaggttggtgccggcgtcttccatgtcctgcttggtcagcttggtgcgaccggtgacgcggcagatctgggtggcgaagtcggcatagtgctgagtgctgccccacagcaggaagatcaggtgcactgggtctatcgggtccatcttgccggcgtcgatccaggcctggaacacggctgcccggccgctgaaccaggcgcggtagtcctggctgaaatattcggtgaggcattcgccgccactgatgatctccatggcgaagattcgcgaagcctgtggctggcgccgcgagaactccatcttggtgcggatgtagcgggtgagcgccgcggccgggtcatcctcggcggtcagcgtgttgaaagtgctgtcccacagttcgaggatattactgagcaccgcgatgtacaggcccagcttgttggtgaagtagtaatgcaagttggccttgggcagcccggcactggccgcaatggtgttcatgctggtgcctttgtagccatggcgcgcgaactcgtcttcagctgcctgcagaatcgcttgttcgttcttttgccgaatgcggctggcgggcttaccggcgtgggtgctgtgggcaggaacttcgaggctcatggaggtttccgtgctgatcgattgagacgacgtgtgcacagataacccaccctcaagcctcagacaagtcctgatgcaataaaaccgtcaaagcggttccaggctgtcgctttccggcgctttgtttgcggcagcgttgagggccttgctttccggcagcagcaagcacaatacgatggccgtcagcccgccgctggtgatggcggagtcaaacaggttttgtatgagcgtcggcatctgatgcagcaggttcggctgggcggcgatgcccaggccgacgccaaacgaagtggcgatgatcagcatgctgcgccggtccagcggcgcctgggcgaggatgcgtacgcccgcagcggcgacactgccgaacatcaccagcgtcgcgccgcccaataccggcttggggatttgctgcagtactgcgccaatcagtggaaacaaaccgagacaaaacagcaccacgccgatgtacaggccaacgtaacggctggccacgccagtgagttggatcacgccgttgttctgcgcgaaggtcgtgttggggaaggcgctgaaggtggcggcgatcatgcagctcacgccatcaccgagtacgccgcccttgagtcggcttatataagaagggccactgataggttggcgggcgatcatgcagttggcggtgaggtcgccgacggtttcaatgctgctgatcagataaatcagcgcgatcggcaggaaggcgctccagtcgaagttgaaaccaaagcggaacgggatcggcaggctgaccagcggcaggtcgggcaaggcttgaggcacgagcttgccgctgaaccacgcagccaggctgccgagcgcgaggccgataatgatggccgagaggcgcacccaggctgtgttcgaacggttgagtagaatgatcgtcagcaccacgaacagacccagcgcgaggttggtgggtgcgccgaagtcgggtgcgttgaagccgccgccaaggtcagtgataccgaccttgatcaagctgatgccgatcagggtgatgacaattccggtcaccaggggcgtgatcacccggcgcagttgcccgataaaccggctcaacacgatctgtaccacggcgccgaaaaagcacacgccgaagatcatcgccatgatgtcttccgggctgccgccgcgttgtttcaccagaaagcccgccgacaacactgcgcccagaaacgcgaagctggtgccttgcaggcagatcatcccggcaccgataccaaatggcctgcgcgcctgaatgaaggtgccgacaccggagaccatcaacgccatgctgatcaggtaaggcaaatgggcggtgaggcccagggtggagccgatgatcagcggtggagtgatgatgccgacaaatgcagcgagtacatgttgcagtgcggcgagaaaggccggcgcgggtttcgggcggtcgttgaggccgtagataagatcgctgctgttggacgcttctggtggcatggcgggcaaactcaaggtctatgtccctgggttgttgcaaaaaactgtccaactgctcagcttttagctgcgaggccgagttagcgggttgctgcgaggctttccaggaagctttccagcaccaaatgggggcgccggcctttgcgcgtgaccgatgcgaggcttaaatcgtaaaaacgcgtagccggtttcagcgcacgcagtcggccttgttgtacccacaggctcgcgtagtggtcgggcaggtagccgatgtagcggccggtgaggatcaggaacgccatgccttcgcggtcggaggcgctggccgtgcagttgagcgcctggtaatgggcctggatctcggcgggcaggcggaaggtcggagcgatggcgtcctgggcatcgatgcgtgcatcgtcgagttgcttgttgtcggcgtagaacaaggggtggccgactgcgcagtagagcagtgagcgttcgctgtacagcggctggtattccaaccctgacagggcgctggcctgggggactacgccgacatgcaggcgaccgtcgagtacgccttgttcgacttcgttgggggcgatcatacggatctggatctgcacgtccggcccgcgctccttcagctgcgcaagtgcgtgggtgatgcgcatgtggggcagggtgaccagattatcggtaaggccgatgatcagctcgccgcgcaagtgctggtgcaggccattgacctcggtgcgaaagctttccagggcacttagcagttgcagggccgactggtagacctcgcggccctcttcggtcagggaaaaaccggcgcggccgcgttggcacagtcttaatccgaggcgttgctccaggtcgctcatttgctggctgatcgccgagcgcccgatacccagcacggtttccgccgcagaaaagccgccgcactccaccacgctgcgaaagatgcgcagcaggcggatatcgaagtcgctgacttgggccaggggatcgggtcgacggctgctcatagtttagtgaaggcctgactgaaggttagaagagttgaatttcaccgactttatcgccgtggcaatttagctgcaacaacgcttttcaatcccgacgctgccttttgccctgcgaggttttgctgatgaacatgcccgaaaacgccccatcgtccctggccagccaattgaagttggacgcgcactggatgccgtacaccgccaaccgtaacttccagcgtgacccgcgcctgatcgtggccgccgaaggaagctggttgaccgatgacaaaggccgcaaggtgtatgactcgttgtcgggcctgtggacctgtggtgccgggcatacgcgcaaggagattcaggaagcagtcgccaaacaactggggactctggactactcgccgggcttccaatacggtcatccattgtccttccaattggcggaaaagatcaccgacctgaccccaggcaacctgaaccatgtgttcttcaccgactctggctccgagtgcgccgatacggcggtgaagatggtgcgtgcgtactggcgcctgaagggccaggccaccaagaccaagatgattggccgcgcccgtggctatcacggtgtgaacattgccggtaccagcctgggtggcgtcaacggcaaccgtaagctgtttggccagggcttgatggacgttgaccatttgccgcacaccttgctggcgagcaatgccttctcccgtggcatgccggagcagggcggtattgcgctggcagacgaactgctcaagctgatcgaattgcacgatgcgtcgaacatcgccgcagtatttgtcgagccaatggccggctccgcgggtgtgctggtgccgccacagggttacctcaagcgtctgcgtgagatctgtgatcagcacaatatcctgctggtgttcgatgaagtgatcaccggtttcggccgtaccggctcgatgttcggtgccgacagcttcggcgtgaccccggacctgatgtgcatcgccaagcaagtcaccaacggcgcgatcccgatgggcgcggtgattgccagcagcgagatctaccagacattcatgaatcaggcgacgccggagtacgcggtggaattcccccacggctacacctactcggcgcacccggtggcctgcgcggctggcctggcggcattggacctgttgcagaaggaaaacctggtgcagagcgtcgctgaggttgccccgcaatttgagaacgcgctgcatggcttgaagggcagcaagaacgtgatcgacatccgcaactacggcctggccggcgcgatccagattgccccgcgtgacggtgatgccatcgtgcgtccattcgaggctggcatggccttgtggaaagccggtttctacgtgcgctttggcggtgacacgctgcagttcgggccaaccttcaatagcaagccgcaggacctagatcgcctgttcgatgcggtcggcgaagtgctgaacaagatcgactgatttctccttctatatagaacaactttttcaggagccccgcatgagccttatccagcatttgatcaacggtgagttggtcaatgattccggccgtagtgctgacgtgtacaacccgtcgaccggccaggtgattcatcaagtgccgttggccagccgtgaaaccatccaacaggcgatcgactccgccaaggcagcgttcccggcctggcgtaatactccgccagccaagcgtgcgcaggtgatgtttcgtttcaagcaattgctggaacagaacgaagcgcgtatctcgcaattgatcagcgaagagcatggcaagacgctggaagatgccgccggtgaattgaaacgcggtatcgagaacgtcgagtatgcgtgctctgcaccggagattctgaagggtgagtacagccgtaacgtaggaccgaacattgatgcctggtcagatttccagccgctgggcgtggtggccggtattacaccgttcaacttcccggcgatggtgccgctgtggatgtacccgctggcgatcgtttgcggtaactgtttcatcctgaaaccatcggagcgtgatccgagctcgacattgctgattgcacaactgctgcaggaagccgggttgcccaaaggcgtgctcagcgtggtgcacggcgacaagggcgcggtggatgcgctgatcgaggcgccggaagtgaaagcgctgagtttcgtgggttcgacgccgattgccgagtacatctattccgaagcgaccaagcgtggcaagcgcgtacaggcattgggtggagcgaagaaccacgcggtgctgatgccggatgcagatctggataacgccgtcagcgctctgatgggggcggcatacggttcctgcggcgagcgttgcatggcgatctcggtggcggtgtgcgtgggcgaccaggtggcggatgcgttgatcgccaagctggtgccgcaggtcaaggcgctgaagattggggcggggacttcttgtggcctggatatggggccgctggtgaccggtcaggcgcgggataaagtcagtggctatatagaagacggtgtctcagcgggcgccaagttggtggttgatgggcgtgggctgagtgttgcgggccatgaagaaggtttcttcctgggcggtagtctgtttgatcatgtgacgcctgaaatgcgtatctacaaagaggagatctttgggccggtgctatgtgttgtaagggtggatagcctggaagcggccatgcaactgatcaacgatcatgaatacggtaacggtacgtgtatcttcacccgtgacggtgaagcggcgcgtctgttctgtgacgagattgaagtgggtatggtgggggtgaacgttccattgccggtgccggtggcatatcacagctttggtggctggaagcgctcgctgtttggcgacctgcatgcctacgggccggatggggtgcgtttctatactcgtcgcaaggcgattacccagcgttggccgcaacgggccagccatgaagcctcgcagtttgctttccctagcttataagtagtgctgaaagccggccccttggggccggctttcgcgtttctggggcttttttgacccatgtgacagaaatatgaaaaaaggtgttgacggcagattctggaagtctataattcgccccacttccggcgcagtcgaaacggaaaactccttggtaaacaaagagttacgcagaattcgacagcgacttgcttcagttcatcg

SEQ ID NO: 48 - DNA, 8838 bp, Pseudomonas nodulensis
aagccccctcccacactgtgggagggggcttgcccccgatgaggcccgatcagacaccccatcagccaagggataaacccatgcccgccttcaacaaaatcctgatcgccaaccgcggcgaaatcgcctgccgcatccagcgcaccgcccaagccctgggctaccgcaccgtcgccgtctacagcgatgccgacgcccaagccctgcatgtgcagatcgccgatgaagccgtccatatcggcgcggcccccgtgcaacagtcgtacctcaatatcgaggcgatcctcgccgccgccagactcaccggcgccgatgcgatccaccccggctacggcttcctctcggaaaaccccgacttcgcccgagcctgccaacacgccggcctgaccttcatcggccccagcgtcgaggccatcgaactgatgggcagcaaacgcctgtccaaactcgccatgcttgacgccggcgtgccgtgcattgccggctaccagggcagcgcccaggacgacgccaccctgcaacaggaagccgggcgcatcggctacccgttgatgatcaaggccagcgccggtggcggcggacgtggcatgcgcctggtgcaccagccagaagcgctgctggacaacctgcataccgcccgttcggaagcgaaaaatgcgtttggcagcgacgaactgatcctcgaacaagcgctggtcgagccgcgccacgttgagatccagttgttcggcgacagccacggtcagctgatctacctcggcgaacgcgactgctcggtccagcgccgccaccagaaagtcatcgaagaggccccctgccccatcatgacggccgagttgcgccaggccatgggtgaagccgcattgaaggccgggcgcgcggtgaattacgtcggcgccggcaccgtggagttcctgctcgaccgtagcggccgcttctacttcctggaaatgaacacccgcctgcaggtggaacacccggtgaccgagttgatcaccggcctcgacctggtggattggcagttgcagatcgccgcagggcaaccgctgccgttgacccagtcggaggtgaccctgagcggccatgccatggaagtgcgcctgtacgccgaagacccaacccagggctttctgccgcaaaccggcgaggtactgcgctgggaaccggcggccggcgtgcgcatcgaccatggcgtggtgcagggccaacgtatcagcccgttctacgacccgatgctgggcaagctcatcgcccacggcgccacccgtgaagaagcgcggcgcaaactgctgcgggcggtggaagacacgctgttgctgggcgtcgcaaccaatcagcaactgctggctgacctgctcaagcacccggactttatcaacgacgatttcagcaccgggtttatcgccgagcacttcagcgagataccgcgtccttctgtgtcgagcgaacagctcgccctggccgctgcactgttctacacccacagtgccgagcaacatccccacggtctgtcgggctggcgcaacaacgccagtagcccttgcacctaccgccttgaggtcaacggtgaaatccacaccgtcagtaccgaacccctgctgctcagcgccgacggtcgccacgccaccctgatgctcaacggcatccgtcgacgcatggcctatcatctcgaaggcgaccaactgtggctacccggcctgtgcgtgaccaaccgcacccagcaagtggccagccgccaggccgatgccagcagcggcacggtcaaggcgccgatggacggcgccatcgttgatgtgcgggtcagcgccggtgatagcgtcaccaagggccaactgctgctggtgctcgaagccatgaaaatggagcatccgctgaccgccggcatcgacggcgtgatcaagggcgtgcaggtgattgccggtgaccaggtgcgcaatcgccaggttttactcgagatcatctagccccctaggcggaactacagggccgggctacgctctatccccaacagaaagggaagagtacgggaacctgcgcgatgcctcattggctgattattgaccttgaagccacaacggatgaaggcggctggcccgtgacggagatggaagtcatcgagatcggcgcaagcctggtcaaccgccagggccgcgagctggatcacttccagcgctttgtgcggccgctgcgccgccccttgctgacgcctttttgccggcagttgacccacatcacccaggcgaacattgatggcgcagtgccaatcactgaggtgtggccgttgttcgagcgctggctgggccagcaccaggcgcgcctggagggttgggccagttggggtgactacgatcgcaggcaactggagctggagtggcagcgccatggcctggccagcgccctcgccaccacgccccatgtgaacctcaagcagcgcttcgccaaggcccgtcgcctggacaagcccctggggctcaacggcgccctgcaattggcaggaatgcagttccacggccagcaacaccgggcgttggaggatgcgcgcaacacggcgcgcctgctgccattgattttgccggtctaggcagcttccctggccttgggcatactggccgacctttccagacccttttccgaggaatcgcccatgttcaaagtcaacgagtacttcgacggcaccgtcaagtcgatcgctttcggcaccgcagaaggtccggcgaccatcggcgtcatggctcccggcgaatacgaattcggcaccgcccagcgtgaaatcatgcacgtggtgtccggcgccctgaccgtcaagctgcctgacgccagcgactgggaaaccttcgccgccggcagccagttcaacgtgccggccaacagcaagttccaactcaaggtcgccgtggacaccgcttacctgtgcgaataccgcggttaagggtttcccggaaacaaaaaaatgcccgtctcctgcgagacgggcattttttatgggcttggaaagctattcgagaatggtcaccggcatgccgacttccaggcggccgatgctatcgttgaccaggttctggccgaagatcgcgccattttcagtcttgcgataggtttccagcgtggcgaagggttcacggtcagcactgcgttcgccggtctgcgggtcgatggtggtgaggatgcagcgcgagcagggctttaccgcacggaactccacatcaccgatacgcaggcgtttccagccatcttcggcgaaggcggtgctgccttcgatcaccaggttgggtcgaaaacgcagcatctccatgggccggccgatgcgttgcgaaaggtcatccagcgaagcctggccaatcaccagcagcgggtagccatcggcaaacgcgacctggtcatcgtccttgccataaccggcctcggtggtgcgggcgcgttcgagggggatctgcaccagccgcgtcggcttgccgataaagtcactgacccaggccgctgcctcgtcgcctgcgtccggcacccgcaaggtgtcgcgccagatggtcacaccgcgcaactcggcattaccgcccggcagtgcgacatccagcggcgtgtaaccgggcgaactcaaggtgagcccaccgttgcggttccacagtgccgacagttgactcatcttggccacggcgcgctgcgtgaggaagcgcccgctggcttcgtccaccagcatccagcgtcgatccccatccaccccgagcttatccaggccgacctgttgcaggatttcggccttgccggacttcaaggggtaacggtacaacgcgctgagacgaagcatgagcctgcattcctgaggggcaaagccatcaccctaaggtcatgcgggcacttcgtccagcatcagacgctggcgcaccacgtccaccagcttgtcgggctggaatttggacaggaaattgtcgcagccgaccttcttcaccatcgagtcgttgaagctgcctgacagcgaggtgtgcaacaccacgtaaaggctgcgcaggcgcggatcgttgcggatctcggtggtgagacggtaaccgtccatctcgggcatttcggcgtcggtgaaaatcatcagcagtttgtcggtcatcacatggccggcgtcggcccaggccttgagcatgttcaacgccttgaggccgtcactggcgatgtgcatcttcacgcccagttggccaagggtgtcgcgcagttgcgagagggccacgttggagtcatccaccagcagcacttcgcggccgcgggcgcgctccagcaccgggtcttcgagtttctcgcgggaaaccttggcgttgtacggcacgatctcggccaggactttttctacgtcgatgatttccaccaactggtcgtcgaccttgctgatggcggtgaggtaatgctggcgcccggcactggtcggtggcggcaggatggcctcccagttcatgttgacgatgcggtccacaccgcccaccaggaaggcctgcaccgagcggttgtactcagtcacgatgatggtgctgttggggccaggcaccagcgggcgcatgccgatggcctgggacaggtcgatcaccggcagggtctggccacgcaggttgaccacaccgcacacgaaaggatgacgctggggcatcagggtcaacttgggcagttgcagcacttcctgcaccttgaacacgttgatggcgaacaattggcgccccgccaggcggaacatgaggatctccaggcgattctcacccaccagttgcgtgcgttgatctaccgtgtcgagaatgccggccattaaaagctcctgatgcgctgaggaatttgtgcggttcacataaggtgagttatcggcggcgaacgccagaccttgacccccgtaaaatgccacgtaaatccattgatgtcacactgacatcatgctttactgcgctggcctctccgtatggcaagaaagcgacgttgcgcgacattcaattcgacgcaaggttccgctatgtaagggattcccctacgcacaatcaggcccaacctgatattcgcaatatctaatagccattaatgtgacgccattctcaatgcatgaatggagtcaggcttttgtttgccatcccaagccctcggcccacgggccttccagacatacagatgtcggcaatcgaaggtgtgcaattgacccctttcatgagggcagcgcacagccgttgccgtcactctaataaacgtcctactgaaaactcagaagccgcctacaggtcccagtcatatttcggcgctatttttaagccattcacccagtgcgacatctcatcacccgaccttatgttgtggagacttgtatgatgaacagcgcaaatgaatggcaaaccacactccccgagttcctgcttgaagcagaaacgctgctggccaagtcggaagagtgcttgagccacctgcacctgattcgcgacgacagcgacgccatcgactgcatgaagtccagcctggccaaactggccgaaaaggccgacagcctggccctgcaggtgatcagcgagttttcccggcatatccaatacctgatcgccaatgcggcaagcccgatgcaactgcatgaccaggcgctggatgcactgcatgcgtgcctgacgctactcgcgtggcaactggaactgatcgatgtgcgtaccggcgaactgagtatggacgagagtgagcaggcgacattgattgcaaccgtcacgctgcagatcccgcagaaggatttcacttataaaccgcagcagcgtgtgcaccacgcctcttgagtggataacaagtcgtattcgaacccgaagttatctaaaaacgacacgactattaactcgttggacttgaacagcgcagacaaagatatcaattagccattaacggtaataacgatacaaccaaacagaaataatataacttccccactccatgaactctgggaataccgcccggagcatttgcgcggtcaataatccggtgaggcacggcaccaggcgaccaacggtaacagtggtggtactatgccccgctcgaagtgactcaacttcatcatgcataaaaacgattcgataacgcattccaaacagagccccgtcagccgcagtgaccggacttcccgcagcgcaccctcattggctccatccgctatgtacgccagcctcaagacactcatcgcaaggtccgcgtcccgcagcaatgcacgccgtttgatcctcgccctgtgtcttggctcgctgctgctgagcctctggacctattccagctccgaaccgctgccgttgctggtgattgcgcttaacctggccactctcgtggtggtcggcctgcaacaatggcgttcacgcaagtccatcaagttccagccccaggaactggccgatcgcctgttgcaggtacaggaaaacgaacgtcaccgcctcagccgtgaactgcacgacgatatcggccaactgctcaccgccgccaagctgcaaagcgaatggctcaagcgtcgcctgcccgacgacctgcaagcccagtgctcggtgctgtgcaacaccctgaatgaaaccctggccaaggtgcgtgacgtttccgccatcctcaaccctcgccagttggccagcctgggcctggaagccagcctgcgtgcacacctgctcaagaccctggaaaacactccgatccactggagcctggaatgccagcaacggctgaccggaatcccggaagaaatggcagtggcggccttccgcatcacccaggaagcggtgaccaacatgctgcgccacgcccaggcgcgcaacctgctggtacgcctgcaacgcttgcccgaaggcctgtcgctgaccatctgcgatgacggccagggtttctcaccgtccatcaatcccggcctggaaggccaacggggcatggccggcatgtccgagcggatagatcagcttggcggtacgttgtccgtcagcagccagcccggcaatgggacacggatcgaagcgcttttcccctgggcgcctcgcgccctcgaacgggccagttcccctaaggttctcgagtgagctgcaaattactcctggtagatgaccatgcactgatccgggccggcgtacgcgcgctggtccaggatattcccggctacacggtgatcggcgaagccagcgatggcgcgcagttgctggagcagttcagcgccctgctgccggatatcgtgctactggacctgtcgatgaagcacaccggcggcctggacgccttgcagcaactcaagcgcgcctaccccaagagcaaagtgctgatcctgtcgatgcacaccgacccggaactgatcatgtgtgcgctggagtccggcgcccatggctacctgctcaaggacaccaccgccaacgagctggaacacgcgctgctggccttgcgcaacaacgagcgctacctgagcccggcgatcgcccacaccgtgatcaaccaggcgctggtgcgcagccaggggccgaccactcccgccggccacagccacaacctcacggcgcggcagttggagatcctgcgcctgatcgtgcgcggcaagtccacccgggagatcgcccatgggctgggcctgagcatcaagactgtggaagcccaccgctcgcagatcatgaagcgcctgcagattttcgacgtggcgggcctggtgctattcgcggtgcgcgagcagatcatcagcctggacgactagcggcgaatccaccggcaagtgtacgcgcaaggccttgggcaaggcctcgaagtgcagatcatcgccctccagcggctcgccatccaggttgatgtacaagccctgtgcgaccttgatattcacccacggcaggcgcgcccgcacaaacatggtgtccaggccccagccgttgctcatcaactcgcgcaaggtgccgaccacttcctggggggccggcaggatgctgacgtccagcaggccgtcgtcggccatggcgcctggacatagctcatgcccaccgcctgcctggcgaccgttgccgatacccagggcgagcagctcgcctttccaatggaaatcggggccatccagctcggcgtaggcggcctttaactcgctgaatcgcgtcaaaccggtgaacagataggcggcgccgcccaggacttttttcaaatcctcggaggtgttggcggtgacctggctgccgaaaccgccggtagccatgttgaggaagatctgcccgccgacctggccgaggtcgatggccctgggtggcacgtccagcagcgccagcgcctggtcaggctccaacggtacgccggcggccttggcgaaatcgttggcggtgcccaggggcatcagcaccaggctggcttcggtgttggcctgagccatggcttcggccacgtcgcgcagggtgccatcgccaccaccggcgatgatgtgggtgtagccgtcggccagggcttcgttgaccaggcgctgggcgtcgccaccttcccaggtgacccgtacggccaactccccaccctgctcgcgccgggcctgcacggctgaacgcacgtcctcgttgagggcttgcttgccgtggaggatcaacagggctttgggggtggtcattggggaatctcctgattcaaaggtgcttggagtatgtggaccttgggcggggagaaaaaagccattggatgggaaaaaaatcggatgattgagtacatatccgtttcttcggtaacggctgctatgggttccgctcttacagcggctcacttttgaacagcgcaaaagtaagcaaaacgctcttaccccaacactcggcacctcgcctaggctcggtgtgcccgtaattcgacagtgatttggggggccgccgccccgcgccatccatggcg

SEQ ID NO: 49 - DNA, 24152 bp, Pseudomonas nodulensis
  misc_feature (892)..(892): n is a, c, g, or t
  misc_feature (896)..(919): n is a, c, g, or t
  misc_feature (926)..(926): n is a, c, g, or t
gccccgcgccatccatggcgcggggcggctaagatcaaaatcaaaagcaaagcgcggcggccgaatagccgaccgaatcgttgaagcgtacgcgctcccctgtaggagccgggcttgcccgcgaaggtcgttaaagatgacgcgggaaaccagaatgaacgcggcgcgctcactggttttagggctgcttcgcagcccaacgcggggcaagcccgctcaccacagtaaagcggttacacggaacaaaaaacgtatctgcgatgcgcagcgagtcgctcttgcttgtgatcttcggcgccccgtcaaacacgctggccgaacgcaggcttgaatccgtgggtaactcggcaggacgccgggttagccgcactgggccaaggatggcccattgcggcggcccacggattcaagccggagagagggcacaccgagcctacgcgaggtgccgagtgttggggcgaagcgtttttggttactttttgcgctcttcaaaaagtgacccgctgtaagagcggaacccatagcagccgttgccgcagaaatggatatgtacccaaaccccaatcaactcttatgcaacttactcatcaactgcgcctcagcctgcgtcaacccacacgactgcgtcagctcatccaccgtagcccccatccccaccagcttcgccgcctgcgcaaacgaaagactcgaaggatcgcgctgctcaatctgcgccagcttatccggcaacggcgcaagaatcgcacgcaactcatgcacctcgtccccgaccttcaccgcactctgctgaaagtgatcaacccgcttcaccaactccagcacccgccggtcacgcacagcatcacgctcagcctgctgtagcaacaactcgcgctgctgacgcacgtagcgncgcnnnnnnnnnnnnnnnnnnnnnnnngggcgangccatccatggcgcggggcggctaagatcaaaatcaaaagcaaagcgcggcggccgaatagccgaccgaatcgttgaagcgtacgcgctcccctgtaggagccgggcttgcccgcgaaggtcgttaaagatgacgcgggaaaccagaatgaacgcggcgcgctcactggttttagggctgcttcgcagcccaacgcggggcaagcccgctcaccacagtaaagcggttacacggaacaaaaaacgtatctgcgatgcgcagcgagtcgctcttgcttgtgatcttcggcgccccgtcaaacacgctggccgaacgcaggcttgaatccgtgggtaactcggcaggacgccgggttagccgcactgggccaaggatggcccattgcggcggcccacggattcaagccggagagagggcacaccgagcctacgcgaggtgccgagtgttggggcgaagcgtttttggttactttttgcgctcttcaaaaagtgacccgctgtaagagcggaacccatagcagccgttgccgcagaaatggatatgtacccaaaccccaatcaactcttatgcaacttactcatcaactgcgcctcagcctgcgtcaacccacacgactgcgtcagctcatccaccgtagcccccatccccaccagcttcgccgcctgcgcaaacgaaagactcgaaggatcgcgctgctcaatctgcgccagcttatccggcaacggcgcaagaatcgcacgcaactcatgcacctcgtccccgaccttcaccgcactctgctgaaagtgatcaacccgcttcaccaactccagcacccgccggtcacgcacagcatcacgctcagcctgctgtagcaacaactcgcgctgctgacgcacgtagcgcaacaggaatgccagggtcccggcccataacagggccaggacaatcaccgcggcctcaaggaacaatcagatgctctccagttccgaccactcttcttcgctcatcatcttgtccagctcaaccagaatcagcagctcgccgttcttgttgcacacgccctggatgaacttggcggattcttcgttacccacgttcggcgcggtttccacttccgattggcgcaggtagaccacttcggccacgctgtcgaccatgatcccgaccacttgcttgtcggcctcgatgatgacgatacgcgtgttgtcgttgacctcggtcggtaccaggccgaagcgctggcgggtgtcgatcaccgtcaccacgttgccgcgcaggttgatgatgcccagcacgtagctcggcgcacccggtaccggggcgatctcggtgtagcgcagcacttcctgcacgcgcatcacgttaatgccgtaggactcgttgtccagtttgaaggtcacccattgcaggatcggatcatccaaaccttgtgcggacgctgacttattcatacccctgaccccttcaagattggccacgcaccagcgtggaccttattgttcaatcaactgcgtttagtaaccggcatcgttttaaccgcgccactggcgatcaactcggccagttcggcgacgtcgagcaacgcgcacatgtgttcgatcacggtgcccgccagccaaggccgttggccccggtggctgcgccatttgatttcgttcgggtccaggcgcaacgagcggctgacttgatgcaccgccagcccccactcgtagccctgcaccgagatcacgtattgcaaaccctggcggaagtcgtcgcggtagcggtcgggcatgacccagcgcgcggtatccagcactttcaggttaccggcctggctcggcaggatgccgaggaaccactccggttgcccgaacagcggcgtcaattcctggccttccagggaatagatcgagcccaggcacaccagcggcaccgccagcgtcaagccggcgacgtcgaacaacaggcattcgaacggctcggcagcccagctcgggcgatcatcaccggtgaccggcggcggtgtgatgctcggcggcaggtgcacttccaccaccggctcgaccaccacgggggcaatcaccaccggagcaatcggcacgacgacaggcacaacctgcgcatcgcgggcctgttcttccaggacggccagctggaattcatccagcgtgctttccggttctacaacggcaggctccaataccaggatcggttccggcagcgcttcctcggtcgcgtcctgcagcagggcatccaggtaggattccagcgccagttgcggccgggtcttgagttcgacgggacggttcatcacgccacctgcgccacaagctgctgcgacagcaggtgtttgagcaacgcgcggtaggccagtacgccacggcttttcgcgtcgaactgcgacggcgccaggccggcgcggctggcgtcacgcaggcgcgtgtccaccgggatatagccgttccagatggtgtccgggtaggcatcgcgcaatacgcgcagggtgccgagggacgcctgggtgcggcggtcgaacaaggtcggcacgatgctgaacggcagcgcctgtttgcgcgagcggttgatcatcgccagggtgctgaccatgcgctccaggcctttgacggccaagtgctcggtctgcaccgggatcaccagttgctggctggccgccaaggcgttgaccatcagcacgccaagcaacggagggctgtcgatgatcgcgtagtcgaagtcctgccacagttgcgccagggtcttggcgatcaccaggcccaggccgctctgccccggtgactggcgctccagggtcgccagcgcggtgctggagggcagcagggaaatgctttcgttactggtgggcaacagcagttgcccgggcagatcggccggcacactgcccttgtgcaggaacagatcgtagttgctgtgttccagcgcatccgggtcgtagccgaaatagctggtcatggagccgtgagggtccaggtccaccacgaccacacgcttgcccgcctcggccagcaagccggctaaggcgatggaggtggtggtcttgccgactccacctttttgattggcaactgcccagactctcattcggttggttcctcccggcaggcacaggcgcgaccgagacattgcatggggttattgagccggcgacggagaattgacggcactctgtcgaaccggcggttttaccggggccggtgcagtttgtgtgccagcccgcttcaaggccgcatccggtgttgcattagcggtgccggtgccggtcaggctgcggcgcacatccaggttgcgcgacaccaccagcaccacccgacggttacgcgcgcggccttccgccgtggcgttattggccaccggctggaactcgccgtagcccacggacgccaggcgaccagggttaacgccctgcatcgcgagcatgcgcacgatgcttgaagcgcgggccgaggacagctcccagttggtcgggtactgcgcggtgctgatcgggaaattgtcggtgaagccttcgacatggatcgggttttcaaatggcttgaggatcgccgccaccttgtcgatgatggtgaacgcctggtcactgggcaacgcatcggcactggcgaacagcaggctggaattgagttcgatctccacccacagctcattaccgcgcaccgtcatctggttggagctgatcaggtcgccaaacgccgcgctgatgtcgtcggcgatgcttttcagcgggtcgctggtgccgcccacgccggcagcggtttcatcgctgtcgttgaccagcggcttggccggggtcacggtcttgggcctctcttcaccgatgggaatcggcttgagcgcacggtcggcgtcgttgaacacgccgatcagcgcctgggaaatgactttgtacttgccttcgttgatcgacgagatggagtacatcaccacgaaaaacgcgaacagcagggtgatgaagtctgcataggacaccagccaccgctcgtggttgacgtgttcttcaggctcgcgacggcgacggctcacaatacatacctcccatcaatccatgaagccctggagcttcaattcgatggaacgcgggttctcgccctcagcgatcgacaggatgccttcgagcagcatctcgcgataacgcgactggcgcatggcaatcgacttgagtttgctcgccaccggcagcagcaccaggttggcactggccacgccgtagatggtcgcgacaaacgccacggcaatgccgctgcccagttgcgatggatcggcgaggttgcccatcacgtggatcaggcccatcaccgcaccgatgatgccgatggtcggcgcgtagccgcccatgctttcgtagactttggcggcgttgatgtcgcggctttcctgggtgtagaaatccacttccaggatgctgcggatcgcttccggctcggcgccgtccaccagcaattgcaagcctttgcgtgcgtagctgtcgggctcggcatcggccacgccttccaggcccagcaggccttccttgcgcgcggtgaggctccagttgaccacgcggtcgatgccgccgggcaggtccacgcgtggcgggaaaatgatccatatcagaatctgcatggcgcgcttgaacgagctcatgggcgattgcaacaacgccgcgcccacggtgccgccgatcacgatcagcgccgccgggccgttggccaacgcaccgaggtgcccgccttcgaggtagttgccgccgatgatcgcgacaaacgccatgatgatgccgatcaggctcagtacatccatcagaggcaggcctccaccagatgcttgccgatgtcgtccaggctgtagacggcgtcggccaggtccgccttgacgatggccatgggcatgccatagatcacgcagctggcttcgtcctgggcccagatggcgctgccgccctgcttgagcaggcgcgcaccttcacggccgtcggcgcccatgccggtgagcactaccgccagaactttgtcaccgtaggacttggctgccgaaccgaaggtgatatccacgcacggcttgtagttgaggcgctcatcgcccggcaggattttgatcgcgccacggccgtcgaccatcatctgcttgccaccgggggccagcagcgccaggccagggcgcaggatgtcgccatcctcggcttccttgacgctgatgcggcacagcttgtccaggcgctcggcgaaggccttggtaaacgccgccggcatgtgctggatcaatacgatcggcgccgggaagttggctggcagttgggtcaacacgcgttgcagcgcaaccgggccacccgtggaggtgccgatggcgaccagcttgtaggccttgcgcttgggtgcgggcgaatgagccgacgccgcaggtgccagcgtgcgagcgggtgccactgcaggccgtgtcactggcgcaggcgcagggcgcgcaaacgacgacgtcggtgcagcgggagccggtgctggcgcagcggttggagtaggcgtgctgaacaggctgcgacggttactgcgcgaaatgctgtgcaccttctcgcacagcatctgcttgaccttctcggggttgcgcgagatgtcttcgaaattcttcggcaggaagtccaccgcaccggcgtccagcgcatccagggtgacccgggcgccttcgtgcgtcagcgaggaaaacatcaggaccggggtcgggcagcgttgcatgatgtgccggactgccgtgatgccatccatcatcggcatctcgtagtccatggtgatcacgtccggtttcaacgcaatggcttgatcaatcgcctctttgccgttggtggccgtgccgaccacctggatcgttggatcggcggaaagaatttccgagacgcggcggcggaagaaacccgaatcgtccaccaccaggaccttgactgccataaacactccgttaggcggggcgggcactaccgccctgccccaccagaatcaaatacgccgagcggcgtaacgcttgagcatgctcggaacatcgagaatcagcgcgatccgaccgtcaccggtgatggtcgcacccgacatgcccggggttccctgcagcattttgcccaaaggcttgatgaccacttcttcctggccaaccagttgatcgacgacaaagccgatgcgctgggtgcccacggacagaatcaccacatggccttcgcgctgctcttcatgggccgccgatgccaccagccagcgcttgaggtagaacaggggcaatgccttgtcgcgcacgatcaccacttcctggccgtccaccacgttggtgcgcgacaggtcgaggtggaagatttcgttgacgttgaccagcgggaaggcgaacgcctggttgcccagcatcaccatcagggtcggcatgatcgccagggtcaacggcaccttgatgacgatcttggagccctggcccttggtcgagtagatgttgatcgagccgttgagctggctgatcttggtcttcactacgtccatgccgacgccacggccggacacgtcggaaatctcggtcttggtcgagaagcccggggcgaagatcaggttgtagcattcggtgtcggtcaggcggtcggcggcgtccttgtccatcacgccgcgcttgaccgcaatgttgcgcaatatggtcgggtccatgcctttgccgtcgtcagtgatcgacagcaggatgtgatcgccttcttgctccgccgccaggatcaccttgccgccacgggacttgcccgaggcttcgcgctcttccggggtttccacgccgtggtcgacggcgttgcgcaccaagtggaccagcgggtcggccagggcctcgaccaggttcttgtcgaggtcggtttcttcgcccaccagttccaggttgatttctttcttcagctgacgcgccaggtcgcgaaccaggcgcgggaaacggccaaagactttcttgatcggctgcatccgcgttttcatcacggcggtctgcaggtcggcggtgaccacgtcgaggttcgacacagccttttgcatggcttcatcgccgctgctcaggcccaggcgcaccaggcggttacgcaccagtaccagttcgccgaccatgttcatgatgtcgtccaggcgcgcggtatcaacccgcacggtggtttcggcttcactggcaggcttctcggctgtcggcgcggcggcggcacgtgccggagcaggtgcggcggccggggccggtgctggcttggcagccggtgcaggtttggcggccggcgctggcgcagcggccttggcggcgaccggtgcagcggtcgccaccgctgcggccggggccacttcgctgaacttgcccttgccgtgcaactcgtccagcagggattcgaactcgtgatcggagatcagcccatcgcccgcaggggcggcgctggcagcagccggtgccgcagccgtggcggcgacttccggcaaggcgtcggccgcgaaggtgcccttgccatgcagttggtcgagcaatgcttcgaattcatcgtcggtaatgtcggtgctggcgctggccgccggtgcatccgcaggagcagcagcaggtgccacggcgtcggccgcgaactggcccttgccatgcaactggtcgagcagcgattcgaactcggcgtcggtgatgtcttcgctggtcggtgcggcgaccggggcagccggcgcttccgcctcggccttgacggcactgagggagttgagcagctgttcgaactcgctgtcggtcacatccggctcggcctcaaccacaggctccggtgcggcttcaaccaccggtgcggccgacgtgtcggcaggttccgccaggcgcgccagggcggccagcagttccggagtggccgccgtgatcggtgcacggtcgcgcacctcgctgaacatgccgttgaccgcatccagtgcttcgagaatcacgtccatcaactccgaatcaacgtgacgctcacccttgcgcaggatgtcgaacacgttctcggcgatgtggcagcactccaccagctcatggagctggaggaagccggcgcccccttttacagtgtgaaaaccgcgaaaaattgcattgagcaggttcgcatcatccggtcggctttccagctcgaccagttgctcggacaactgctctaaaatttcgccggcctctacaaggaaatcctgaaggatttcttcatcggcgccgaagctcatgtgggtgctccttagaagcctaaactggataacaggtcatcgacatcatcttgacccgatacaacgtcttcacgtttatcggcatgaatctgcggaccttcacccttggcgagatgtttttgtggatctttttccgagaggatcgcttcgcggtcatgttcgatgccggcgaaacggtcaacctggccagccataagcaccaatttgagcaagttgctttccacttcggtgaccaactgggtcacacgcttgatcacctgaccggtgaggtcctggtaatcctgggccagcagaatgtcattgaggttgctggaaaccgtgcggttttcctgctcgctgcgtgacaggaaaccgtcaacccgacgtgccaactcgcgaaactcctcagcccccacttcccggcgcatgaagcggccccagtcgtggctcagggcctgggcttcagtggccatgccgttgaccagaggcgtggcgttttccaccaggtccatggtgcggttggccgccgcctcagtcagcctgaccacataggacaggcgttcggtggcatcggtgatttgcgagatttcttcggcctggggcatatgcgggtcaatctggaaattgacgatcgcactgtgcagctcgcgtgtgagcttgcccacttcctgatacaggccgcggtcacgggtctggttgagctcatggatcaactgcaccgcgtcgccgaactggcctttttcaaggctgtcgaccaactggtgagcatgctttttcagggtcgactcgaagtctccctgtgacgtttctttatgctccatagctcccccgcgatggcattagccgtggatgcgttcgaagattttttcgatcttctctttcaaggccagtgcagtgaatggcttgaccacgtaaccgttgaccccggcctgggcggcttcgatgatctgctcacgcttggcttcggcggtcaccatcagcacaggcaggctgcgcagcttttcgtcagcgcgcacgtggcgcagcaagtcgataccggtcatgcccggcatgttccagtctgttaccagaaagtcgatgctcccgctgttgaggatcggaatcgccgtaatgccgtcgtccgcctcgaccgtgtttgtgaacccaaggtcacgcaacaggttttttatgatccgccgcatcgttgagaagtcatcaacgatgaggattttcatgttcttgtccaattcgacctccaagcagtcttaaacgcgcccagcacctggacgcgccatttcaatcaacaggcattacacaaaaaggactgccgggggcaccacgggtcgaacccgcgaaggccggttgccctcgcggtatcgtctgcagtgtccccacactgcctgttcagcgcgctcgccactctcccaagcgcccccgcaagcgggctgcgcactggctgtgcaactggctgacccgcgattcgctgacacccaggacctcaccgatttccttgaggttcagctcttcgtcgtagtacagcgccaacaccagccgctcacgctccggcaaattggcaatcgcgtccgccaacgccccctggaaacgctcatcttccaggtctcgcgatggctccatatgagcactcgcgccgtcctcgtgcagcccttcatgttcgccgtcctgcaacaggtcgtcgaaactgaacaatcggctgcccaaggtatcgttcaaaatcccgtagtaatcgtcgagactcaattggagttcggccgcaacttcgtgatctttagcgtcgcgaccggtttttgcttcaattgcgcgaattgcgtcactgaccatgcgtgtattgcggtgtaccgaacgcggcgcccagtcacccttgcgcacttcatcgagcatcgcgccacggatgcggatgcccgcatacgtctcgaaacttgcacccttgctcgcgtcgtatttggtcgacacttcgagcaagccgatcatgcccgcctggatcaggtcttcgacctggacgctggcgggcaggcgcgccagcaagtgataggcaatgcgcttgaccaggggcgcgtagcgctcgatcaactcgccctggctgtcacgggcagacttcttgtacgcgttgtagccggtcgctgtcatagcacgggtcctgcgctcgtctgatgcaccaatcgctcgacgaaaaactccagatgcccccgggggttggcgggcaatggccaggtatcgaccttctgggcaatagccttgaacgccagtgcgcacttggaacgagggaacgcttcgtagactgcacgctgcttttgcacagccttgcgcacacactcgtcgtagggaactgcgccgacgtattgtaaggcgacatcgaggaaacgatccgtgaccttggtcaacttggcgaacaggttgcgcccttcctgcgggctctgggccatgttggccaggacgcggaagcggttcatgccgtagtcgcggttaagcagtttgatcagggcgtaggcgtcggtgatcgaggtgggttcatcgcagaccaccagcaacacttcctgcgcagcgcgcacaaagctgaccacggactcgccgatcccggcggcggtgtcgatcaccagcacgtcgaggttgtcgccgatgtcactgaacgcctggatcagcccggcatgctgcgccgggctcaggtgcaccatgctctgggtgccggaggcggccggcacgatgcggatgcccccaggcccctgcagcagcacatcgcgcagctcacagcggccctcgatcacatcggcaagggtatgtttgggcgtcagccccagcagaacgtcgacgttcgccaaccccaggtcagcatccagcagcatgacgcgacggccaagctctgccagggccagggacaaattcactgacacgttagttttcccgacgccacctttgccgccggtcaccgcgatcacctgtacgggatgcatgctgcccattttatttctttaccttgtcttgcttagacgcaggctacatggcttggccgcgtgaatcgcttgcagaccatcgatgtagatacatttcacggtgttcataccgccctcaacctacccgcttcgccgggttgtggtagaggtcggcgaacatatcggccatcgcttcctcgctaggctcgtcttgcatttgcacgctgactgcacggctgaccaactgatgacggcgcggcagatgcagatcatccgggatccgcggcccgtcggtcaggtaggcgaccggcaattcatgactgatggccaggctcagcacctcgcccaggctcgcggtttcgtcgagcttggtgaggatgcaaccggccaggccgcagcgcttgtaactatgatacgcagcggtaagaacctgtttctggctggtggttgcaagcaccaggtaatttttcgacttgatgccacgcccggccaggctttccaactgcatgcgcaatgccgggtcgctggcttgcaggccggcggtgtcgatcagcaccacgcgcttgcgcagcagcgggtcgagggcgttggccagggactggcccgggtcgacatgggtcaccgacacattgagaatgcggcccagggtcttgagctgctcctgggcaccgatacggtagctgtccatgctcaccagcgcgatattctgcgcgccgtacttgagcacgtaacgcgccgccagcttggccagggtggtggtcttgcccatgccggcagggccgaccatggcgatcacaccgccctcttccaggggttcgatttcgggggtggcgatcatccgcgccaagtgggccagcaacatgcgccaggcctggcgaggctcttcgatttcggtggtcagggccagcaggtcgcgggacaacgggccggacaggccgatgcgttgcaggcgacgccacaggttggcctgttgcggtttgctgccttgcaattggttccaggccagcgaacccaactggacttcgagcagctcacgcaggccattgagttcaaagcgcatcgagtcgaacacacgctggtcaaccgccgctgccggggctggcgcagcgggacgcggcggctctttgaaggttggctcaaccaatggctccgcggcggtcagcggcaggccggcgaacaactggcgattggtggtggcatcgctgtcgccacgcatgctcagttcagcctgggccgaaacaatccgcgaagcggtcttgcgcagctcgtcttcgagctccatgttcggcacgcgcggcgccaaggccgaaggtgtgtaatccagggcagccgtcagctcgacaccgccggcaatacgacggttgccaataatcgcggcgtcggcgcccagctcatcacgaaccagtttcatggcctgacgcatatcggcggcgaaaaaacgcttcacttgcataacccactaccctcagccgttgggccctactgtcgcgacgatagtcacttgcttgttgtcaggaatttcctgataagccaaaacgtgcaaattcggtactgccaggcgcccaaaccgcgacaacatcgcccggaccgggcctgccaccagcaggatcaccggttggccttgcatttcctggcgttgcgcggcgtcgatcaacgaacgctgcagcttctcggccatgcttggctccagcagaacgccctcttcctggccttgtcctgccttctgaatactattgagcaatatttgttccaacctgggttccaaggtgatcacaggcagctcggagtcaagccctacaatgctttgcacgattgcgcgcgacaatccgacgcgcaccgaagccaccagggcggcagtatcttgactcttggcggcattgttggcgatagcctcggcaatgctgcgaatatcgcgcaccggcacctgttcggccagcagcgcctgcaacaccttgagcaactgcgacagcgacaggatgcccggcaccagctcttcggcgagttttggcgaggctttgccgagcaaacccatcaattgctggacttcttcgtggccgatcagctcgtgggagtgcttgtagaggatctggttgaggtgggtagcaaccacggtgctggcgtccaccaccgtgtaacccagggactgcgcctggctgcgctggctgatttcgatccacaccgcgtccaggccaaaagccggatctttggcggtaatgccgttgagactgccgaacacctgccccgggttgatcgccagttcgcggtccgggtagatctccgcttcggccaggatcacgcccatcagggtcaggcggtaggcgctgggcgccaggtccaggttgtcgcggatatgcacggtgggcatcaggaagcccaggtcctgggacagcttcttgcgcacgcccttgatccgcgcgagcaactggccgccctggttgcggtccaccagcggaatgaggcggtagccgacttccaggccgatcatgtcgatcggggtcacgtcatcccagcccagctccttggtttcctgggcgcgggccggggatggcagcagttcctgctggcgtgcaatctcctgctgggcctggaccttgaccgcattctgctttttccagaacaggtaggcaccgccggccgccatggccgccatgctcaggaaggacacatggggcatgcccggcacgatgcccatgatcgccatgatgcccgccgccacggccagggccttgggcgaggcaaacatctgccggctgatctgcttgcccatgtcttcggagcccgatgcacgggtcaccatgatcgccgctgctgtagataacaacagtgatggcaattgcgccactaaaccgtcaccgatggtcagcaaggcgtacaccttgcccgcatcgctgaaggtcatgccgtgctggaacatgccgaccgccacgccgccgatcaagttgatgaacagaatcagcaggccggcgatggcgtcaccgcgcacgaatttgctggcaccgtccatggaaccgtagaactcggcttcctgggccacttccaggcggcgtgacttggcttggttctggtcgatcaggccggcgttgaggtcggcgtcgatcgccatttgtttgccgggcatggcgtcgagggtaaaccgcgcgctcacctcggaaatccgcccggcgcccttggtcaccaccacgaagttgatgatcatcaggatcgcgaataccacgataccgaccacgtagttaccgccgatcaccacctcgccaaaggcctggatcaccttgccggcggcggcatggccgtcctggccgtgcagcatcaccacgcgggtggacgccacgttcagcgccaggcgcagcaaggtggcgaccagcaggatggtcgggaataccgcgaaatccagcggccgcagggcgtacacacagaccagcagcaccacgacggacagggcaatgttgaaggtaaagaacacgtccagcaggaacggcggcatcggcaacatcatcattgccagcatcaccagcaacaacaacggcacacccagattgccccgcgagaggtcagtcagggtgctgcgcgccgtgccgagcatttgagagcgatccaccagtattcctcgtgtcctttgaagcaaagttttgacgcggttgggcgtcctgaaggcggtattgcaagaagccttccaacttttgttttggaacgtcgatcgctatggacgcccacgttttttcggaaagaacacattttaaatgtgggagggggcttgcccccgattgcagcttgccagactaagagtcggtgactgacacaacgccatcgggggcaagccccctcccacacttggatgtgcgcgcagccggtactactggggaaatttctgacaaggttttgcggttgcccctaggaaactcgctctctagtctccgtacaccgctgcaaacgcagtggtcgggcgtcgcggcccggatttccaaagagcaaaagcactatcgcccgctttcagttgacgcttttttagcgtctactgtgcggcgctatggcggctgtgcgcgggataccttcgggtatgccgggttgctccttgaccggtccgcgaacctgcgcacagctgtcaccccatcgcgtcgcggcgatcagtggcagctccacttttaaggagcctcacaatgatcaaacccaccccaaatccccccatcagtctgtttaccgtcgtagacactctcaaaaccgaagacctgctggtcaacctcaccgaaaccctcgcctcggccgacgcgctgatgagtgattttgcgtttgaattggaagggccaaaacgcgaaggcgcgctgggtgttgcacagttgattgggctggcaaagctgcttgccgacagagtgctggaggacagcgagcgcttgatggcgtgatggcggatcgttcctgcactaccctgcgggaacgatcatcaagctcataggacgcggacgttctcggcctgagcgcctttggccccctgcgttacctcgaactctactttttggttctcttcaagcgtcctgaaaccgtcgcccgtgatggccgagaagtggacaaatatatcgcccccaccgtcttgagtgataaacccaaaccccttctccgcgttaaaccatttcaccgtacctgttgccattgccgttctcctgatatctcactcaaggacttgctggatgaccctgacctcggaggcatggacgccatcgggtcgatggatcatctgaaacgccacctgcacccccactgcaagccggacgccgcgcgaaccaatgaggtccactggaacggcctcgccgtccacgacaatcaaaccctttccagttgcctggtcataggatgtgacgatgcctctgataacccgattcaaaaccactctccctgcatctcatttacagcctgcgcgcagtgcatagggcaatagaaccgcgagcagcgcagtctggctactgtgaagtttgacaggtagacgccagttatcgacgagtggtagggagggcgacccggtgtcaggaatcgcggcgcaggtccggcggaatcggcagatccttgagcggatcgggccgcttgcccttgcccgcacggtactggcgaatctgatagacatacgccagcacctgggccacggctaggtacagcccggcggggatttcctggtcgaggtcggtggaatagaagatcgaccgcgccagctccggcgattccagcagcaggatgtcgttggccaccgcaatttcgcggatcttcaaggcggtaaagtcgctgcccttggccagcagcatcggcgcgccgcccttctccgggtcgtacttgagggccacggcgtagtgggtcgggttggtgatgaccacgtcggcgtcgggcaccgaggccatcatcttgcgctgggacatctcgcgctgcagttggcgaatacgctgcttgacctcggggcggccttcctggtccttgtgttcgtcgcgcacttcctgcttggtcatcagcagtttcttgtggctttcccacagctggatcggcgcatccaccgcggcaatgatgatcaacccggcggccatccacagtgcgctccaacccaccacctgcacgctgtggatgatcgccgactccagcggttcatgggcgattcgcagcaggtcgtcaatgtcggacgacaacaccatcagcgccacgaacaggatcaggatgaacttggccaacgccttgagcagctccaccagggccttggtggagaacatgcgcttgagcccggcgccagggttcatgcggctgaacttgggcgccatgctgccggcggcgaacagccagccgcccagggcgaccgggccgatcagtgcggcgagcagcaaggtgatcaggatcggctgcaccgccaggatcgcgatctggcccgaatgcaaaaggtaccggcccatggcgtcgggattgagcagcacctcgcggggcaaggtgaagttgtgtttcatcaactccatcaggtccagcgccaggccgccgccgtagatcagtaacgcgccggcgccggccatcatggtggcgacggtattgagctccttggagcgggcaatctcgcccttttccctggagtcctttttacgtttctccgtggggtcttctgttttgtcctgaccactctcgctctcggccatggctcagcgcgcccgtgccagatcacgtaagaactgcagggcgtcggtcgccagcggttgatactgattgagaatgtcggccaggccgatccagaaaatccccatgcccaacaccagggtcaacgggaaaccaatcgagaagatgttcagttgcggcgccgcacgggtcatcaccccaaacgcaatgttcaccaccagcaacgcggtgatcgccggcagcaccagcaacagcgaagcgcccaatacccagccgagccgtccgacgatctcccagaagtgattgaccaccagccccgaacccaccggcaaggtggtgaagctttcggtcatcacctcgaaggccaccagatggccgttcatggccaggaacagcaaggtcaccagcatggtcaggaattgcccgatcaccgccgccgacacaccgttggtagggtcgaccatggaggcgaagcccatgcccatctggatcgagatgatttgcccggcgatcacaaaggcctggaaaaacagcgtgagggaaaagcccatcagcgcgccgatcaggatctgctcggcgatcagcagaaaggcactgaggtcgatggcattgaccggcggcatcggcggtaacccaggcacgatcaccacggtaatcgccaccgcaaagtacaggcgtacgcggcgcggtacgagtgtggtgccgaacaccggcatggccatgagcatggccgtcacccggaacagcggcaggatgaaggacgccacccaggtgctgatctgggtgtcggtcaacgccagcaaggactgcatcgggtcagccgatcaactgcggaatactgccgtacaactgcaggatgtattccatgaaggtctgcaccagccacgggccggcgacgatcagggtgaccagcatcaccagcaggcgcggcaggaagctcaaggtctgttcgttgatctgggtcgccgcctggaacatcgccaccaacaggccgaccaacaggctcggcaccaccagcacggcgaccatcatggtggtcagccacagcgcttcacggaacaggtcgacggctacttctggcgtcatcgcgctataccccgccgaaactgccggccagggtgccgataatcagcgcccagccgtccaccagcacaaacagcatgatcttgaacggcaacgagatgatcagtggcgacagcatcatcatacccatggccatcagcacgctcgccaccaccaggtcgatgatcaggaacgggataaagatcatgaagccgatctggaacgcggtcttcaactcggacgtaacgaacgccggtaccaggatggtcaacggcgcctggtccggggtggcgatgtcggtgcgcttggacaagcgcatgaacagctcaaggtcactggagcgggtctgcgacagcatgaaatccttgatcgggccctgggccttgtcgatcgcgtcctgggcggtcattttctccgccaggtagggctgcagggcttgctggttcaccttgtcgaacaccggcgccatgatgaacagcgtcaggaacagggccatgccggtgaggatctggttcgacggcgtctgctgcaggcccagggcctggcgcaggatcgagaacacgatgatgatccgcgtgaagctggtcatcagcatgacgaacgccgggataaagctcagcgcggtcatgatcagcaggatctgcaggctgaccgaatactcctgcgcgcccgccgcgttggtgcccaacgtgatcgccgggatcgacaacgggtcggcgccgaacgccaatggcgcggccagcaacagcatgagcgtcaataaaacgcgcattacttcttatccttctgatccttgcccagcaactccatcaggcgctgggcgaattctggcgtggcggactgactctgatccacgctcaccggggtcttgagcacgtgcaacggggtgatgcggccaggagtgatgcccagcaggatctgctcctcgcccacctgcaccagcaccagccgatcacgcgggccgagggcgcgcgaaccgatcatctcgatcacctggccgttgcccggccctacccgctgcacgcggcgcatcagccaggccagcacgaatatcagcccgaccaccagcaacaggcccagcaccaactgggtcaattgcccgccgatgccactgctcaccaccggtgcggctaccgctgtcgcttgcgcggccggctcagccgcgagggcgctcaatggcagcgccagaaacagtcccgccatcgaatacttcatatcagcgcaacttcttgatgcgttcgctcgggctgatcacgtcggtcaggcggatgccgaacttttcgttgaccaccaccacttcgccgtgggcgatcagggtgccgttgaccagcacgtccagcggctcgccggccaggcggtcgagttcgatcaccgagccctggttgagttgcagcaggttgcggatgttgatttcagtgctgccgacttccatggaaatcgacactggaatgtcgaggatcacatccaggttcgggccatcgagggacaccggctcgttgtttttcggcacgctgccgaactcttccatgggcaggcggttgccggccggtgcggtggcggcgtcagcagccagcagcgcgtcgatatcgtcctggccaacatcgccggtttcttccagggcagccgcccattcgtcagccagggcctggtcttcggcggaagtgttttcgtgttcggtagccattacatgtcctcggcggagcaaacattcataaataggagtgaatcagcggcggttgatcggctcgaccacctgcagcgccaggttgcccttgtgggaaccgagcttgaccttgaatgacggcacgccgttggcgcgcatgatcatttcttccggcaattcgaccgggatgatgtcccccggctgcatgtgcaaaatatcgcgcaggcgcagctgacgacgggccacggtggcgctcagcggtacgtcgacgtccagcaggtcttcgcgcagggccttgacccagcgttcgtcctggtcgtccaggtcggactggaaaccggcgtcgagcatctcgcgcaccggttcgatcatcgagtacggcatggtcacgtgcaggtcgccgccaccgccatcgagttcgatgtggaacgtggacaccacaatggcttcgctggggccgacgatgttggccatcgccgggttcacttcggagttgatgtactcgaagttgacttccatgatcgcctgccaggcttccttcaaatcgatgaaggcctgctccagcaccatgcgcaccacccgcaactcggtgggggtgaactcccggccctcgatcttggcgtggcggccgtcgccgccgaagaagttgtccaccagcttgaacaccagcttggcgtcgaggatgaacagcgcggtgccgcgcagtggcttgatcttgaccaggttgaggctggtgggcacatacagcgagtgcacgtactcgccaaacttcatcacctgcacaccgcccaccgccacgtccgccgaacggcgcagcatgttgaacatgctgatgcgggtgtaacgggcgaaacgttcgttgatcatctccagggtcggcatgcgtccgcggacgatacgatcctggctggtgaggtcataacttttgacgctgccgggctcggcagccatttcggtctgtaccagaccatcgtcgacgccatgcaacagcgcatcgatttcatcctgggacagcaggtcttgcacggccatgtcgtgatcctactgcaatacgaagttagtgaagagcgcctgctcgaccacgactttgccgagctccttctgggccacttcctgcacgctggccgtaaccttctggcgcagcatttcctggcccaccggggtggcgagtgtgtcgaagctctggctggagaacagcatgacgaggttgttgcggatcacgggcatgtgcaccttgagggcgtccaggtccgcagcgttacgcgccagcaaggtgatgctcacctgcaagtagcgttgacgaccgttctgattgaagttggcgacaaaggccggaagcatcggttcgaagattgccggttgcttgacgttagtggcggtttcagcggcgggtgccggcttgctggcactgctgtgcatgatgtaccaagtgccgccgaccgaggcgccgatggccaggagcaggcccaggactatcaacaggataagcttgagcttgcctttgcctgcgggtgcttttgctgcgtcgtcgctcttcgccatgccaataatccgtcactattcggggattcatagatctacggaaaggcaagagcaagtgttatgccagagttgtctggtcatttgggaagagaggacaccaaaaatcaaatgtgggagggggcttgcccccgatagcggtgtatcagtcacccatgtttcagctgacacagcctcatgggggcaagccccctcccacatttcgtccggatcaggcgtagtagtcgaccgcactggagccgattacggttgaggtgaccggcgtcacggcttcagccacatcaaggtggttgccgctgtcgccattgtcaccaccgcgcccgccgctaccgctcacaccacgggtctgggcctgctgctgttgttgctcctgcccacgggactggtccgacacgttcacgtccacctggcccatgccctgctgggcaaacatctcccgcaagcgcccggactggctttccaacgcttcacgcactaccgggtgggcactcatgaagttgacctgggcctgttggtcggcggtcatgttgaccttgatatccaggcggccgagctcagcgggttgcaactggatctccgccgacttgaggttggcgctggacaggtacatcacccggttgacgatttcgtcggtccagccgctctggtgcatggccaatggtgcattggtcaccggtggcaaggcgttggcggttttcggcgtggccgcctgggtcaatgcggccaggcggttggcgaagtcatcgacacgggtgtcgctgctggcgttcttcaggtccttgagaccgtcttcgatcaacccgctgaaagccttgtcgccgccctggtcggtgctgtccttggtggcttgctggtcgaccatattggcgaggccagcggcgaaattctgcgcggcggtgggttgatcctgagtcggtgccggagcgctttttgcctgcgcctggctgctggccgatacgtgaccgccctgctccatcgccaggcgcacggctggcatggcatccaggggatcagcctccggatcgaacgcgggcttggcctcctcggtcgcggcgaccggcgccgcgaccactggctgggttttgtcatccttggcggtggtaacgggcgcgggtgtttcaaccggcaccggcacggctaccggggtgacggtggcaatcaatgccgggtcgaccaccgggtcggccggaggctgctgcaccagggtcgggtcggctggcgcgtcatcatccttgctggcgctgtcgtcggttttggccggcggcgtggcaggcaaggtattgccgctatcggcaacggctggcgtgctggcggcaggcttgtcattgcccgctgcaggcttggcgctggcatcggacgacttgcctgcggtgggtttggccgagctgtcgtcggtcttgaccgaaggtttggacgcctggttggcaaacacttgagcgaagccagggcccttgtcccgtgggtccgcagccgctgccggtgggttggcagagggcgcttgaggcttggccgcgggggcagcctgaaggagcgaattgggggcgactggcataggtaaaggtctccactgcatgggggtcggggatgcagtaactggaggtagagcaagagttgggccaggttttgggttttgtgtgtatatccattatttgggcaacggcggcttatggttccgcccttacggcggctcacttttgaaaagcgcaaaagtaagcaaaacgctcttgccccaacactcggcacctcgcccaggctcggtgtgcccgtaatccga

SEQ ID NO: 50 - DNA, 361095 bp, Pseudomonas nodulensis
  misc_feature (245939)..(245939): n is a, c, g, or t
  misc_feature (245944)..(245944): n is a, c, g, or t
  misc_feature (320924)..(320958): n is a, c, g, or t
caggctcatggtatctctcgtgtcccaaggcatgatgatttcccggcgaagtttatccgccgaaaagtgtccaccatgtccccgtacacccgtcaaccatgtgtccggtccatacaggcctttccaaaagtgacccgccgtaagggcggaaccataagccgccgttacataaaaaacggatatgtactcaatcaaacctgaaaccgctgccgctccgactcatacaacggcttcaccaacgcaaactcccgatcaatctgatcgaccagctcccccagatccccaaccgcagactcaaccgactcaacctccaaccgctgacacaactgcgccaaccgcactgccccaaggttcccactgctgcccttgaaactatgcgcaatccgccccaacgccttggcatcatccctggccttgcgcagcgcttcgacgcgtttttgggaatcatcgagaaaggtatcaagcagcttgggatactcgccttccatgacttcctgcaaacccgacaacacctccgggtccagatgtagatcaaccacttgctcgctccttgatcaagaatcggcggattatgccagagcctcccaggaaaactccacgcagacactgcgcccgccgtccgaccagcgtacatcgctgctcaattgacgcaccaggctcaagccccggcctgacagacggtcaatatcgagcggccgcgccagcatctgctccacgtcgaacccaggaccgctgtcctcgatgcgcagggtcatcctgccgccgacctcggtcggcagcacctgcacatgcacccgtatatagccgctgttgagttgtgccaggcggtcattacgcaggcggtaatactcggcaaacccttgggcgtcacgcttgagccgagaatccagacccagcacgccatgctccagcgcattggaatacagctccgccatcacgctgtacagcgccccgctctgctcccgcagaccatgaatctccagcagcagttgcagcaagtacggcaatgggttgtaacgcttcaacgtctcagcacgaaattcgaaactgactgaccaatccagcggacaagactggccactgtcggcatacaacggcccgctggcacgcagctgctggccggcgtgcagggtgatttccaccatgctcacgtcatcccgcgcttcgccccggaacgccgccagggcctgctcgatatcttcaaacagccgatccggctcacggttggcagcgaacacctgctgcaagcgttcagcgccgaacagctggtcattggcgtcagcggtatccagcacgccatcggacaacaggaacactcggtcacccaaggccatgggccagacttcggtgcgatcatcaaaagcttgcgccgacagcacccccaacggcaaatgccgcgattccagtggcgtacgcttgccggtggcgatttcatgcacgtagccttcgggcatgccgccgttccacacctccaccacccgccgctgggtgctcaggcacaacagggtggcgcagcagaacatgtccaccggcaggatgcgcttgagcttggcgttcatctcgcgcagggtctgcgccaggccgtagcccttggcggtcatgccgtagaacacttccgccaggggcatggcgcccaccgccgccggcaggccatgcccggtgaagtcgccgagcagcacatgcatgtcgccggacggggtgtaggcggccaacagcaaatcaccgttgaacaacgcatagggcgattgcaggtagcggatattcggcgcggcattgatacaaccggaatgggcaaccttgtcgaacaccgccttggccacccgctgctcatgcagcaggtagtcgtgatgcttggcaatcaggtcgcgctgctgcaaaaccgtcgcctgcaaccgacgcagacggtccatggcgttgatcttcgccgcgagaatcagctgattgtagggcttggctagaaagtcatcaccgccggcatccaggcactgagccagcgcttcgctctcgcgcagggacgtgaggaaaatcagcggcaccagctcctcacccgccaattgcttgatccggcgcgccgcctcaaagccgtccatcaccggcatcagcgcatccatcaacaccagctgcgggcgctcacgggtaaacaccgcgaccgcttcagcgccgttggtggccgtgagcacctggtggccctggcgccggataatggtcgacagcagcaacaggtcggcggcactgtcttcggcgatcaggattgtcagcggctcaaggaccggggccaggacgctcaactgatgtcgaacagtttgtcgaagttggagataccgaggatcttgcgcacatccgaattgctgttgatcacccggatatcggcgtcatcgccggcatggtcgcgcagcagcaagagcatgccgagggcggagctgtcgaggtaggtcgtctctttcaagtccacgatgtaagtgttgggcactttgtagaagcgctcataggcttcgcgaaacgtctggtggctgccgaaatcgaaccggcccttgactgcgatcgtcaacttcgtcccatccagggatacttctgactcgactgacatgtgactgcttccttgtcattggcaatgacacaaggtttagcaggtgccggggatgtgggcaactttcaatagacgtctttgcgcggcatgcgctgcgaaagctcatccagcaacttctgctcgcgcttgtcttcaagcgctcgcgcttcatcgatatagcgctgcaccagcttgcgcaaaccttcgacccgggcaaacgcggcttgccagctctcacgtgccttgtcgaggttgttctggtgccaggccaggctttggcgctgctggccgacggcggtttccaactggttgagaaagccctggtaacccatcagccattggccggacacgcccttgctgccgcgttcgatccattgttgctggtactcgccgcgaaagcgctccaggtcgcccagcttgctttccgccaagcggacttgcccctggaagtaacccaggcgctgcacggcggttttctcggctttttcggccatgtccaccaccggagccaggcgcgcggcgcggctgttggccatggcttagccgcctggcgccggggcgaagatcgactgcaggtgcgcttcgctttcgcccatgctgatcttgtcgttgagaccctggcgcaagtaggtgaccaattgcggttgcagggcaatcgccaagtcggtgtcgcgatcaccgcccgccacataggcgccgacgctgatcagatcgcggctctgctggtagcgcgaccacagctgcttgaactgttgtgcacgggccatgtgttccggcgtgaccacggccggcatcacccggctgatggacgcttcgatgtcgatggccgggtaatgcccttcttcggccaggcgccgtgacagcacgatgtggccgtcgagcacgccccgcgccgagtcggcaatcgggtcctgctggtcatcgccttcggacaatacggtgtagaacgcggtgatcgagccaccaccggcttcggcgttaccggcacgctccaccagcttgggcagcttggcgaataccgacggcgggtaacctttggtcgccggcggttcgccgatggccagggcgatttcccgctgggcctgggcgaaacgcgtgagcgaatccatcagcaacaggacattcttgcccttgtcgcggaaatattcggcgatgcgcgtgcagtacatggcggcgcgcaaccgcatcagcggcgcatcgtcagctggggaggcaaccaccaccgagcgcttgaggccttcttcaccgaggctgtgctcgatgaattccttcacctcgcggccccgctcgccgatcagcccgaccacgatgatgtcggcctcggtaaagcgcgtcatcatgcccagcaacaccgacttacccacgccggtaccggcgaacaggcccagacgctggccacggccgaccgtcaataatccgttgatgctgcgaatgcccacgtccagcggcacgctgatggggttgcggttgagcgggttgatggtggggccgtccatcggcacccagtcttcggccttcatgccgcccttgccgtccagcgcgcgaccggcgccgtcgagtacgcggccgagcatgctcatgcccatcggcaggcggccggtgtcggccaacggcaccacgcgggcgccgggggcaatgcccgccaggctgcccacgggcatcaggaaaatcttgctgccggaaaagcccatcacttcggcttcgacctgcaccgggtggtagctgtcgtcgttgatcaccatgcagcgactgcccatggcggcgcgcaggccttcggcttcgagggtcaggccgaccatgcgcagcaggcgcccttcgaggatcggctggccgggcaactccgtggcctcggcgtaaccacccaggcgcttggcgaagctggtgcggtcaaggcgcatcgacggcgtccaggtctacgctcagatcaggctcggccgggtgcagggcctgttcgtggagctgatcaaagagcttggccatgatttggctgatgcgggtttccaccgtggcatcgatgcggctgtgttcggtttcgacccggcaaccaccgggctgcaacgccgcgtcttcgacgatgcgccaggtttcttcatggcgctcgcgcaaggctttgacctgctcgaaatcctgcgggttgatgtacagccgcacgttgccgacgcccaggggcagcagcttgagcgcttcgcgcatcacgctttcgatatggctggaatccagcaccaactcgcgctggatcacctggcgggcaatgtgctgtaccaggccgaccatggccttttcgatctgcgaatcctgctcggcgatggggtcgaacagcgtacccatcaagcgttccaggctggccagcttgacgctcagcgcctcttcggcttcctggcgcaccttgagggtggtgctgcgaaaaccatctttttcacccgccgcaaagccttcgttgtaggcctcctggcggatggcttccagttcttccagggtcagtggctggacttcatccagcggcacttcttccatttccaccggaagttcttcgaccggttccggctcgggctccggcacatgcgggtcgaagctgggcaacgaccagatgtcgaacccaccgacgtcccgtgcgcgaatcagatcgctgggcgcctcatctttgttcgacatgggaagcgccttagatcatttcttcgccgcccttcccgccgagaacgatttctccggcttcggccatacggcgggcaatggtgaggatttctttctgcgcggtttccacgtcgctgacacgcaccgggcccttggcttccaggtcgtcgcgcaacagttccgaggcacgcttggacatgttcttgaagatcttctctttgacgttttcgtccgagcccttgagggccagcaccagcacgtccgaggacacttcgcgcagcaacgcctggatgccacggtcgtcgacatcggagaggttgttgaacacgaacatgaggtcttcgatctggccggacagggtgtcgtcgatctcgcggatcgagtccatcaactggccttcgaccgagctgtcgaggaagttcatgatgtccgccgcacgcttgataccccccagggtggtgcgcgaggcattcgagttgccggagaactgcttctccagaatcgtgttgagttctttcagcgccgccggctgcacggtgttcagcgacgacacgcgcaggatgatgtccaggcgcactttgtggtcgaagtggccgagcacttcaccggcctggtcggggtcgagatacgccaccacgatcgcctggatctgcgggtgttcgtagcggatcacgtcggcgacggcacgcggctccatccatttcaggctgtcgaggccgctggtgttgccacccagcaggatgcggtcgatcaggccgttggccttgtcttcgcccagggccgaggtgagcatcttgcggatgtagctgtcggagccgacgcccaggctggtctggtcgccgacgatctcgacgaactcgctcatcacctgctcgacttgctcgcggtgcacattgcgcatctgcgccatggccacgcccacgcgctggacctctttgggccccatgtggcgcagcacttgggcggcgtcggtttcaccgagggacagcagcaggactgcggctttgtcgaccttggtgagcttggcaacagcggctcgattatcactcatctgcgttgatccactctttcacgacctgggccacacggcccgggtcttctgccaccagacttttgattgcgttcaactgagcgtcgtagccttcgctcgggcttggcaacaggatgctttgcgggccgccgaggctgacgcggtcgttggccagttcgccgtccaggccgcccatgccacccaactcgacgtcgctgccaccaaaggccgccagttgtttcttgccgttgccggtgatgttgttgagcaccgggcgcagcacgccgaacaccagcaccaggatgaacaacacacccagcacttgcttgacgatgtcccagaaccacggctgcgtgtagaacgcagggtcagcgatcacttcgccacgctcggcggagaacggcatgttgatcacgctgacgctgtcaccgcggctggcgtcaaaaccgacagcgtcctgcaccaggcgcgtgaagcgtgccaattcatcggcgctccagggggcacgggtaacggcgccgtcggcggcattgaccttgacctggtcatccaccaccaccgacaccgacaggcgattgacgcggccctgttgctgcttggtgtggctgatggaacggtcgagttcgaagttcttggtcgactggttacgcttgtccgccgggtacggcgcgagcatcggctggccagtggccgggtccatgatctgttggccattggcgtccagcagtggctggcctggctggatggcgccagcgctggccgtcgcgccgccggtggtttgcggggccgaggccggggccggtggctggttgctcagggcgcccggtacgccttggggcgggccattggcggcagtgcgttgttcgctggtggattgctcgctgcgcagcgccggctggtccgggttgaactgctcggaggtcgattcgacagcgctgaagtccacatcggccgacacttcagccttgtagcggtcgttgcccaacaccggttgcaggatgttgtgcacacgctgggtgagcatgctttcgacgcgacggctgtaatcgaactgcttgccggcctgggtcagcgcggagttttccgcctggtcggacagcaggttgcccttctggtcgaccacagtgatttgcgacttgctcagctcaggcacgctggtggcgaccaggttgacgatcgccagcacctggcctggctccagggagcggccggcaaacagttccaccaataccgaggcgctgggcttgcgctcatcgcgcacaaacaccgagcttttcggaatggccaggtgcacacgggcacccttgacgttgttcaggctggagatggtgcgtgccagctcgccttccaggccacgacggtagcgggtggcttccatgaactggctggtgccgaggccctggtccttgtcgaggatttcaaaaccgatattggcgtcggacggggtgacgccggccgccgcgagtttcatgcgcgcacgggccacgtcgtcggccttgaccagcagcgccccggagttgggttccacggtgtaggcgatgtcggcggcggccagggtttccatgatctgcttggaatccatgccggccaggcttccatagagcggccggtaatccggttgctgcgaccacagcaccacggcaaaaccaatcgccacgctcgcggccaggccgaccatcaggccgacctgacgcaacatggtcatttcggaaaggttttccaggaacgacaggccaaacagcggcggcttgccgtctgccttggcgggtgcgttgtccacgactgcttctgccatgacttaaatctcgtccttaaaccggcatctgcatgatgtcttggtaagcctgaaccagcttgttacgcacctgggtcaacgcctggaacgacacgctggccttttgcgaggcaaccatcacatcggtgaggtccacgccgcttttgccgatctcgaacgcgttggccaactggctggaggcttgctgggtatcactgactttgttgatggcctggccgagcatgtcggcgaagctgctttggcccaattccggcgctggcgcgacggatttcggttgagccatggcatccatttgcatggagcgcatatccaacatcaaccgattgaactcaataccctggctcatgaacttctctctccgacaaccgcatgttttttgacgctacgccgcaattactaggtgaagtagcaacaagggtgccagctctggttcaactcgtaagaaaaggcgacaaaccttgtccgccttgttaccgatcaggtggcgaacagatacgcctcgacgtccatgccggcgtcgcgcatctgcgccagcttgtagcgcaaggtccgcgggctgatccccaggcgctcggcggcctctttgcggcggccgcgctcggcgcgcagggtatcgatgatcatctggaattcacggcgacgcaggtcgtcacccaatgcaccggcggtttcggattcgacaaccacgggcgcaggcgccagggtcggcagcggcgcaatcccgctgcccatggccaggcagaaatcctggggctggatcaggccgccctgttgcaggatcaacgcacgctggatggcgttgtccaattcccgcacattccccggccatggataggcgaccaggcaggcctgggcctcggccgacaggcgtgcctgggcatgcttcatttttttgacgtgattgcccaacagccgctcggccagcggaatgatatccgccgggcgctcgcgcaacgggcgccaggccaggggaaagaccgagagacggtagaacaggtcttcacggaagcgccccgccgccacttcgcccgccaagtcacggttggtggtggcgaccacgcggatatccagctggattggcttgcgtgcgccaacgcgctccacttcgcgctcttgcagcacccgcagcaacttggcttgcaggcccaggggcatctcggaaatttcatcgagcaaaatcgtgccgccatccgcctgctcgaacttgcccgcctgggccgcgatggcgccggtgaacgagcctttttcgtggccgaacagcgtggcttcgagcatgttgtcggggatcgccgcgcagttgatggcgataaacggctgtttggcgcgggtcgattgctggtggatatagcgggccagcacctccttaccggtgccggactcgccggaaatcagcacggtggaatcactgcgcgccacgcgggccgccaattccagcaattgtgcgctggccggctcgaaggcaatcgggccttcgccgtcgctgggcgggatcacgcccagggcatgccgcgcgaccagttcgatcaaggctttgggctcgaacggtttgaccagataatccgccgcgccctggcgcattgcgtcgaccgcacgctcgacagcgccgtgggcggtcatcagcaacaccggcaactgcggctggcgcgcgcgcaacaggctgagcaactggtggccgtccatgcccggcatgttcacatcgctgaccactaggctgaaggactcctgctccaccgcctccaaggcgtcctcggcagaaccgaccgcccggtagtcatggcccgccaacagcagcgtgtcagccaatgcttcacgcagcgcgcgatcgtcttccaccaacagaaccttgatagccataacctcttactccgcgcttgccgcacatgaaaacagcggcaaggtcatcaatgcacaggtgccacgcccgacacgggaatgcagcagcaattctccctgatgggcgcgtgccactgccttgaccacggtcaggcccaggcccgtgccgttggtcttggtggtgaaaaagggttcgcccaggcgctgcaacacgacgggctcgataccgctgccactgtcgctgatgcacaggcgcagggtttgctcgcggctgtacaagtgcactttgagccgcgcaccggggccgctggcctgggtggcgttttcgatcaggttgagcagcgagccgacaagggtgtcgcggttgcacagcagctcgccgagatggctgtcgcactgccaacgcacttgcacgtcttgaatgtgagtggcggccgccgcttgcagggcctgcatcaactcggccggcgtgatgcggtcggtcagcggcaattcaccacgggcaaataccagcatgtcgcgcacctgatgctccaactcgtgcaggcgctccttgaggcgcccggcaaaacgctggtgggtggccgcaggcaattgctcatcagtcaaatgactggcgtagatcaacgccgccgacagtggcgtgcggatctgatgcgccagagaagcgaccatgcgccccagcgaagacaaacgctcgtggcgcgccaactggtcttgcaggtgacgggtttcagtcaggtcgttgagtagcacaagctggcccggctccgcgtccagggcgcgcgtggcaatggacaagcggcggccgtccttgagggagatttcatggccgtcgtcttcacgcggcgcaaagcagcgggtgatcacgtgacgccacagctcgccttccaggggcaggccaagcatgtcgcaagccgccgggttggcttcacgcacgcggccttcttcgtcgatgacgatcacgcccccgggcaacagcgacagcaggttttgcagacggttggccaggcgctccttctcggccaactcttccatgcgctgggcactgaccaccgccaactcgcccttgagctccgaaacacgggcttcgagcaggctgtaggaatcggtcaattggctggacatctggttgaacaacgaaaacgcctgctccaggccttggcggctttgctgttctacagagggaacgagccccgggatggcggggctggaagaatgttgggcggcgtggggcatcatgctctctcgcttggctgaccgtcagttaaacggaacgttgcgagggctgtagcaatacccgtgccgaaaaaaaaccgctgataaatcagcggtttgaaaaacaggcgtcaatcatccgcctgttcatcaccttctttgcggctcataccgtatttgcgcatcttctctaccagggtggttcgacggatgcgcaggcgctcggcggcacgggcgacgatgccgttggcgtcgtccagggcctgttggatcaggccttgttccaggttgccgaggtagtccttcaggtccaggccttcgggcggcagcatcgcggtagagccgaagtccggggtatgaccgttgatggccacccgttcttccaggtcgctgcgcaggctgtcgaccagttgctcgtcttcgtcgtcgacgtagcggaatttcttcggcagctcgaccacgccgatcacaccgtaggggtgcatgatcgccatgcgttccaccaggttggccagctcgcgcacgttgcccggccagccgtggcggcacagggacatgatcgcggcggagttgaaacggatcgagccgcgcttttcgtgttccatgcgcgagatcagttcgttcatcagcagcgggatatcctccacgcgctcacgcagcggggccatctcgatcgggaatacgttgaggcggtagtacaagtcttcgcggaagctgccgacctcgatcatgctttcgaggttcttgtgggtggccgcgatgatgcgcacgtcgacgctctgggtcttgttgctgcccacacgctcgaaggtgcgctcctgcaacacgcgcagcagcttgacctgcatcggcagcggcatgtcgccaatttcgtcgaggaacagggtgccgccgttggccaactcgaaacgcccggcacggctggtgatcgccccggtaaaggcgcccttctcgtggccgaacaattcactttcgagcagctctgccgggatcgccccgcagttgaccggcacaaatggcccgtcgcgacgcttggagtgatagtgcaggttgcgcgcgaccacttccttgccggtgccggactcgccgaggatcagcacgctggcgtcggtgtcggccacttgctgcatcatctggcgcacgtgctggatggcacggctggtgccgaccaggctgcggaacaggttgggttcgcgatggcgaccgcgctcgcgggcctggtcatacatctcgcgatagacctgggcacggtgcagggagtcgagcaatttgctgtagctgggcggcatctccagggtggaaagcacgcggcggcgctggtcttccggcaggtcgacagaagaaatatcgcccatcagcaacacgggaaggaactcatcccaggtagacagtgtctttaacaagcccaaaacagcaccaggagcgtttaccgtcccgatcagcacacaaatgacttcacggctcgatgacaatgagctgaccgcctgctgccagtcatggctgccgcagggcagattttcttcgccaagaaaattcaaaatcaccgctaaatcgcggcggcggacgctatcgtcatcaatcagcagaattttggtttcacgccacatgcaatagcaacttccctagtaaaacttcctgccccagagtgagggcaatcgagacgcctgtacgactttgtaccttactagacgtctgaaatctgaaaacagcactagttaagtcaaaaatgctggcacagtcaaatatatgacgcgcccatcggaccaactgcggctcttcagccgaacagatggtaaacctttgacgcatttttcgcttggttgatctgcgacatctcttcgaaaatcgcctgccgctcacccgtcgtcacctcgagcaattgctggtaaaccgccagcagactctcaagcttttcacgcaacgcatcctcgtctaccggcgcttcgctgagcacctcgtcgatgacatgacgacagcccaggtccagttcgccgatggcgtcccagttgcggtccgccagcgcgcccatcagcgcctcgcgggtttcatcaatgcgttgcaatgcttggctcatgacgtgttcctcaaggccgcttggccttattgtgcagcgccttgtggcgcgccgatggcatcccagccttctttcacggtaatcagcaaacgggcgacttcgtcgatcatgtcggcgtcgttgtgcagattggcctccatcaaacggttggtcatgtacacgtacagaccttccagttgctgaacgtattccttgttgtcgcttttttccgcgctcaggccatcacgaagcccgatgaggatgtcggcggccttgcccagcatcaggccctttgcggcgatatcgccacgcgccaacgcacctttggcctgcgccatgcggtcgagcccgccctccatcagcatttgcaccaggcggtgcgggctggcttcggagatctgggcatgggaattgaccttctggtattggcgaagggctctcatgggattcatgtttctacctcgtgacaggcaacagcgagaagggttgcaataaccattatgtcgactgggtcgcaaaaaactttaacccgacggcactatgaagaacaaagcccaggtcaatggacctgggctttttcatcagccatcaatcagctgcttttctgggcgttactcagcgcgctgagcgtacccaggatactgctgctctgctggcgcagttgcgccaccagcgtatccatggcggtgtacttgcgggtcaaggagtcttgcatggtggtgaggcgttcatccaacgcaacttgctgcttgttgaggtctttaaggctgtcggacaacgacgttgaacgcgtcgccaggatcccggtggtggccttggcatagccatcggtcgccgccgtcaggcgcgcgagcaggccggtcttgccgctgaagatactgttgatatcggcagcgttggtcagcacagccttgtcccactgcttggcatcaatgctcagcgcaccggtgtcgcggtcagtcgtcacaccgaattgcgccagggacttcaaggtgccattgccggacagggcgttgaactcgttgcggatcgccgcctgcaaggtgcgcatggtcgagtcgccggtcaaggtggcggcgacggagttaccggcggcatccttggtcaccttggtctcggcgttcatcgccttgagcagggcgttgtaggtgtcgacgaagcctttgaccccggacttgagggcggtggtgctggtggagacggagatggtcaaagcattgcgagccgtagacgcggtatccgaaggcgtggtcaagggcgacacagagagcaacttgatacttacaccactcactgcatccgtgatgctgttggtcttggactctgcagcaataccgtcaatggtgtacttggcgttcttcggctcgctgaccaccgtgtaaccggtatcaatccccgagttgcccgacatcgtcagatcggaaccaacaccagcattggtggaggtcaggataagacgcgaaccgttggagtcggtgaggatgttggcactcaggcctgcggtgccgaactgcgagttgattgagtcacgcacctgttgcagggtcgcgccggccggcaccttcaggtcgaagttcttgcccgactggctgatcgtcagcgtcgttggggtggtgccactgttcacgaccgtcgactggccgccagtgaaactcttggtcgacagcttcgacggcgtcgccaactggttgacgaccagcgagaagctaccgctcgccgcaccctggttggccgtcatggtggcgaccttctcgtccgaagacgtaccggtcaagccactgaagctgttatcggtgcccatgctggtcagcgcaccccggaaggcgtccagggctgcctggatcttgccgatcgacgacagctgggtggttgccttttgcgactggaggttgatctgagcctgtttcggcgctcgctcggcatccaccagggatttcacaatcgcctgagtgtcgaaacccgaccccacgccggtaatcgttgtacccgccatcatctttctcctgttccggtggctgccgttatcttgacgactagcgcttcaagcggtgacagcaacaagtttcatgccagttcacgccttgtcgtcaaacaatacatgactggcgctggccagactctgtgccagtttcaaggccgtttccgaaggaatctgtcggatcacttcaccggtgtcggtggcaatgaccttgaccacaaccctatgggtggaatcgtcaatggaaaagtccaggttgcgctgggccgcttgtacgaattctttaatatctgtaaccgctttttccaggctgtccttttgggacgtgcccgcggttggcgcggccgcttcaaccttagtcttgtctttgtccgcaaccacaggtgccggagtgccttgaggggccaacggcggataagacaagttcagttttacactcatgtccatgcccaatctcctctgattggaaaagacgaaagggcacgtaaacgcgcccttccgtcattcaccacgcgtcgctattactgaagcagcttcagtacagcggatggcagttggttagcctgcgacaggatcgcagtggaagccgactgcagggtttgctgcttggtcagttcagcggcttcggaagcgaagtcgacgtcctggatggtggaacgagcagcggtgctgtttttctggatgttggacaggttgtctacagtgctggtcagacggttctgtaccgcacccaggcccgaacgggagctggagatggtagcgatagcctggtcgatcacggacacagcgttctgggccttggtggcgtcagtcacgtcagtttgcgatacggaggtcttggtcgaagcagccgaagtagcagcaccgaagacaccagtcacaccagcgccttccagggagtaacccttggcggagtccaggttcactgcaccggtagcgatgatgccgtcagccagggcagtggcagtgccgtaggtgcccgaaccgtctttggtggcaacagtgatggtgccggcagcggtcgaagcgctgaaggccaggttttcaccggtgtcggatttaaccgacagagtgcctttggactcgtcgtagttgacgctgatacccaatttggcggagttcgacttcagttggtcagccaggctggcagtgtcttttacgccaacgaacgtggtggcttggccgccaacggtcatggtgaacgaagctggagcggtagcagcaccggcgccgactacgaactgagcttcagtgctggcggtagcgctcaggccaccgacggcgccgttcagctgggcagcgatggttttagcggaagcagcagcagcaacagtgacgctgctagtctggccgttaccggtcactgcgattgcgccgccagctacaccagcacctggagtgatgccgatgctcttcacctgctgcgaaccgatattgttggcagcaacgttatccagggacaggttgatggtttcgttagcgttggcgccaacctggatcgacttggtaccgtacgaaccgtccagcagcttctggccaccgaaagtagtggtctgggcgatacgggtcagttccgaagtcagggcctggtattcgtcgttgttcgacttacggtcgtcggggctcagggagccggtagccgaggacagagccagagtacgcattttttgcagaatgtcggtcgaagcctgcattgcgccttcagcggtctgcgcgatggagataccatcgttggcgttctttacagcttgacccaggccgttgatctggctggtcatacggctggcgatacccaggccggcggcgtcgtctttagcgctgttgatacgcaggccggaagacaggcgctgcatggaagtggccagggcgccgccagctttgttcaggttgccctgagtagtgatcgaagcaatgttggtgtttactgttaaagccatgacgaaatcctcgttggatggatactgcggcttccggccctggcaaccgccgggtgtggcctgagaacctacgtaatagttatcgtcgtggtagccggttgcttgaggatttttttcgatttttttgctggcgtcgtgccaccccttgtaattcaagggcttacgcaggcaaaaaagcccgatttcattggcttttctggcgccaaataaaaaacgccgatgctctttcgagcatcggcgtttttttgtgctagcggttcaaggtgtcacgggcgatagagaatcgccgagccccacgacaggcccacaccaaaaccgctgatggccacgcgtttccaggtggcgtccatcacatgcttttccagcagcagcggaatgctcgacgacacggtgttgccggtctcgaccatgtccttgatgaacttgtccaccggcgcatcttcaaaacgacgcgccacggcgtcgacaatcgccgcactgccctggtggatgcagaaggcatcgatatcgtcggccttgaggtccgactcatcgagcagctcgtgcaaatgcgccggcaccttgagcaaggcgaagttgaacacctgccgaccgttcatgaagaacacaccgtcgctgactttaaggtgcggggcgccggaaccgtcggtgccgaacttggacttgccgagcaaccacggcgcgtcttcgcccatccaggtagccgtagcggcatcgccgaacagcatggtggtgttgcggtcttccgggtcgacgatcttcgaatacgggtcggcggtgaccagcaggccattcttcaggccagcggcttccatgaagcccttcatcgcgtagatgccgtagacgtagccggagcagcccagggaaatatcgaaggcggcgacgtgggtcggcaaaccgagcttgtcctggacgatggcggcggtgtgcggcaggccctcttcgtcgccgttctgggtgactacgatcagcgcgtcgatcgactcgcgcttcaaatccgggttgttggcaaacaaagcgttgaccgcctcgacacacagatcggaagtttcctgcgcggcttccttgcgcggcaggaacgccgacccgatcttgccaatgatgaattcttcatccttggcgaatttggcaccctgggcgtagttatcgatcccgtctgccggcacgtaactggcgatgctttttatgccaatcattgtggcttcccaatactaaatagctggagaacacccctgggactacgcccggagtgctgacaataaaggggataaccccataaaaatctcgctgaaagccgccacgtaaggaccctgtgacgacttatccttttcacacgatacagtgaagatgcgctttatgactcacaggtcactcaattgtgtgtgctttatgcaaaaccttcaaacaattaaaccccagaaacgacaacggcccgccgtgtttccagggcgggccgcttgacgtgaagccacttacatcttgttgaacaggctcaactgcgagattttcacgaaggccagctgggaggcttgcagcatggtttgctgcagcgccaggttgatggccgcttcacccatgtcgatgttggccagatcactcatcgtgctggtcgtggcaatgctgatgcttgagttctcactggcctggatctccaaggcattctgccgcgccccgacggaaccccgcacattgacgatctgggacatcgaattggccaggttggcgatggccgagttcatggcatccttgagcttgaccgtcgctgccgggttgccgtcggccggcgcctccagcgccttgcgcaactggcccagggtatccagcgcattctgggtcttctgggtattggcacccaccgagaactgatcgcctggctgcggcgggccgctgctcacgtcaaacgtcacgccggccgccgtcaccgtggtaccgccgccggtatcgccggtggcgatcgccttgctggcgctcgaatagggctgggcatacacctcataggccgtcgcgctggtgaacttgatgatcgccccgctgttggacgggaacgtgctggcatagtccgcctgattggtgacctgggcgccggtcaactgtgcgctcgacgcattgctcggcgtacgcgacacgctgaacgtgtctggcttggcctccaggctgaaggtgcggtccttgaccaacgcatcggagttggcgcccggcgccacgtcaccgaggttcatggtgatatcgaacttcaccccccgcagtgcaacgctggtgctgccttccttggtggcgtcgaacgtgccattgcccggtatctcggaagtcacgtcattgccgttcttgtcagacaccttgtattgcgtgctgctggtaaaggtcagcttgtaaggctggccgtcggcgaatttgttggcgtagtcgccgctcgatgtcaccagcccggccgagagcgccaccttgtggtcattgaccgtaggtggcacggtctgcgggttcggcgcaacccagggggcctgggtgcgaccggcgttagccgcaccttcaaggatggtcttgccggtatcacccgcgctgacattcagcgtattggaaatctgcaggctcagcggagtttcatcaccctggtagctgtaggtgccatcgttgttgcgcgcatacggcggcgtctgggtcttggagccggaaaacaagtagttgccggccgagtccttgctgttgagcaggcccaggacctgatcttcaatcgcaccgacctcactggcaatcgagcgacgatcagcatcactgccggcaccaccggccttgagtgccagctccgtggcacgctgcatggcttcactgatcgcacctaaaacactctcttcgttagtcagcgagtttttcaggctggtgatgttgcccgtggactgggccactatgtctttttgctgctgcagcatcaacaaccgcgccgccgccacaggatcatccgcggcggtctgtacacgcacgccggagctggcctggtcctgggccttgaccacacccgaatagttatccgaatacttggcggagctggtctcgaaatactgctgtgtagaaatacgcatcgtcccaggctcccttaaagactattgatcaatgtgctgaaggtttcttgcgcagccttgatgatctgcgacgacgccgtgtagtactgctggaacttgatcatatcgcccgcctcttcgtccaggttgacctgggacactgagttgcgcgcgttcttgttggcggtcagcaatgcattcgtcgcggtgctgtcggtaccggcagccgcagccttggcgccaacggtagacaccaacttgctgttggcccccaccaggctggtgccgccagtgccatcagcggccgtgccgatggttgccttggtctgcaggcttagcaggtcaagggcgttgcggttgtcggacttgccggaggcattgaacgagaacgtcgtgctgtcgccgttggccggcgaaccgcccaccgtggtgtcgaaactgaaactcttggccggcaccaccaaggcaccgttggcatcgcgcatcggcacgttgaccgtgaccttgttgccctgccccggaacaatgctgccggtgccgatcgggttgccctgggcatcattgagcgtgtacggctgggtgccatcggctgccggcttgccgaacaccatcttcaccggcatcgagtgttcaatacccgtgcgcaattgggcagtggcggcgccgccctggatatccaggggcaccgtcagggtcggcggggtaaacgtgccggtgccctggttggtcttactggcttgcccggataacggcgcagcaaaggcgatcttgttcggatccgtcagcaccgtgccaatgtccttggcaccattggcggtcggactgaccttgaagctgtccccggtggccatcggccccttgccatcgagcgccaaggtgaaaccatcgatcacggccggtggcgtggccgtgacgtcaaaggtccccatggccttgccatcggaacgcaccacggtgacgttgttcgggttggcgctgtcgctgaaggtgaccttgtaatcgaaattggtcagcttgctgctgtccttgatcgtcacgttcaggttgccggaacccgcgctgttgtcacccgaagcctggctgcgctgggcaatggcggcggcgctgttgatatccttgaacagcgagctgccgaactgactattgaggtcaaggccctggcccaactggttgttgatggtgtctgcggtggcgatggcaatgcggcccagatcattgatggcaggcatcagcgcatcggtgcgatagcgcaacagaccgccgatgctaccgccgctgagcacgttgcccaggtcgagcgactcaccgccgccaacgttgagctggatggtgaactggctggtgtcgttcttgctcggtacggcggaaatcgtgttggactggtcacccagtaccagcgactggccggaaccggtgctgacactgaacacgccattcttctcggtggcggtcacgccgaccaattcgttcagcgaacgcacggcttcggcacgtgcgtccagcaggttggccggggccgtgttcgacgagccctgcacctgggcgatctgcttgttgagcgaggcaatggacgaggtcagcttgttgacctggtcactcatcgagctcaactggccgttgatggtttctttctgctggcccagttgcgtagagatcgagttgaagcgattgctcagcgtctgcgccttggtgatcaacacctggcgggccgagacatcgctcgggttggccgaggccgtctgcacggccgagaagaactcactgagcacagccgacatgccggtggtcttatccgacagggtcttgtcgacggcgctgacctgatccaggtacgccttggcatcgctgttgagcgaggtgctgttctggtacgccgcgtcgaggaactcgttatacacccggcgcacatcggccagggtggtaccgctgccgatgtacacaccgccgtactggttcgccgcgctggcattctgggtggtctgctgacgcgagtaacccggagtgttggcgttggcaatgttgttactcaagaccgacagcgatccttgagaggcgttgagccctgacatcccgatactgagcaaactcatggttcagaccttataaatgtgtggttgcgccagcggcagcgtaattctggtaactgtccatcgttttggcgatctgcgaaatcttgctggcataggccgggtcggtggcgtaaccggctttttgcaactcacggacaaactgttccgggttgtcggccgatttgatgacttctttatagcgatcattgctttgcagcaaggtcaccaggtcatggaagctgtcctggtaggagttgtaggaacggaactgcgccgtttccttgaccatcgccccatcgcggaactcgctggtgatcgcacgcgcctggccgccctgccaactctggccggccttgatgccgaacaggttgtggctgctgctgccgtcttcggcacgcatcaccgatttaccccaaccggtttccagcgcggcctgggccaccaggtacttcggatcgacaccgatgcgcgcagcggccgccttggccatcggcaacatggtggcgacaaattcatcctgcgaactgaaggctttcttcgccggcgccaacggtggctgggctacggcgcggccgtagacctgcatgcgcccgctcggcacggcgaaggtgcgcgcgctgctgttgatcacgttgtcatcggccacgctgttgcgcagcggcgcgcttttggcgtcaatcgcgacaggtgcgttcggtacgatgccggccagcaggcgatcggtcagcttgctcggcaaggcgatacggcgctggttcatcaattccatgtcattgctgtgggacgccgcagcgccagcctgaggctcagcaacacggtaagcccacagcggacgctggccattggagcggcccagcggcccttcggcctgggtgcctgccgcaatctcggtcggcacatcgactttcttctcaggcgtggtgcctgccgggccctgcaaggtggcggcctgggcctccaccggcttgttcttctgcatctggcgcatcagcacgtcggccaggccgatacccccgccttcacgggacatcgaaacggccaactgctggtcgtacatttcctggtactgcttggccgccggcgtgttcatcgggttgtctttacccagcgcctcggtggccgaacgcatggacttgagcatttcgctcaagaacagcgattcgaactcctgcgcgaccttgcgcatgttgccttcgctgttcttgtcggcaccgaccttgagctggttaagccggttcaggtcggaataagaccccgagtccgccgtgctgctgatcccgctcttgcgcatatccatggccatggcctcagatcacgatcaggtcggcttgcaaggcgccggcctgtttcaatgcttcaaggatcgccatcaagtcgccgggcgctgcgcccacctggttcaccgcgcggacaatctcatccagggtggtgccggggccgaacttgaacatcggcttggcttcttgctgggcattcacccgcgaacgcggcaccaccgccgtctggccgttggacaatggccctggctggctgacgatcgggtcttcggtaatggtcacggtcaggctgccgtgggtcacggcggccggcgagaccttgacgttctggccgatcacgatggtaccggtgcgcgagttgatgatgactttggctacagcctggcctgggtcgacttcaaggttttccaggatcgacagatagtcgacccgctggcttgggtccagcggcgccgtcacgcggatcgagccaccgtcgatggcctgggccacgcctgggccgagcatgtcgttgatcttgtcgaccacgcgcttggcggtggtgaagtcggagcggttgaggttcaaggtcaggctgttgccttggttgaaaccacttggcacggtacgttcaaccgtggcgccacccgggatacgcccggccgacggcacgttgacggtgatcttcgagccgtcgcgaccttcggcgtcaaacccgcccaccactaggttgccttgggcgatggcgtagacgttgccgtcaatacctttcagtggcgtcatcagcaaggtgccgccgcgcaggcttttcgagttaccaatggacgacacggtgatatccaccacctggcccggcttggagaacgctggcaggtcggcgctgatcgacaccgccgcgacgttcttcaactgcacgttgcccgagcccgccggcactttgatgccgaactgcgagagcatgttgttgaaggtctgcagggtgaacggggtctgggtggtctggtcacccgtaccgttgagccccaccaccaggccatagccgatcaactggttggaacgcacgccggagatgctggcgatgtccttcaggcgttcggcctgggcgacagcgctcaaggaaagcaggagtgcggccgccatcagctgtttgaagttcaaagtggccacctagaaagggaacagcgggctaaggaagaaacggtcgaaccagcccggctgactcgcatcagcaaacgaacccgtacccgagtaggtaatgcgcgcatcggcaatgcgtgtcgacggcacggtgttgtcggtggagatgtcatcggcgcggaccatgccggcaatgcgcaccaactcatcgccggtgttgagggtcatccacttttcaccgcgaatggcgatgatgccgttgggcaacacgtcggccacggtcacggtaatcgaaccggtcaggctgttgccctgccccgccgcgctcttgccgttggtggcacggtcgccgctgtagccggcgctaaggctcaagtcaccactgcccaacgggttgttggtgttaggcactgcgccaaacaacgaggtcaggccgataccggtcttgctggtcttgcccacctgggagttggcgttcttgctggcctgagtcttctcgttcagggtgatggtgatgatgtcaccgacccggaacgccttgcggtcgctgtacaggttctgttcgaaaccggcctggtagatcgagccattgttggcggccgctggcaacggcgtgcgtggcaacaccggcgcatagtacgggtcattgggttttggcgtcggggcgacacagcccgcgagcacggtaatcccactcaatgccagaacagaaacatagcgattcatgacccttacctcacggtgttgcaggcgccctcaagagcgccccatagacttgattacagattctgcgttacgaacgaaagcatctggtcggcagtggagatcaccttggagttcatctcgtacgcgcgctgggtggtgatcatgttgaccatctcctcaaccgtgctcacgttggaggtttccagggtgctttgcagcgtggtgccgaaaccgttcaggccaggggtgccgatttgcggcgcgccgctggaggcggtttccaggaacaggttgttgcccatggcttgcaggccggccgggttgatgaagtcagcggtctgcaggttgccgatcacttgcgacgcggggttgccggccacggtgatcgacacggtgccgtcgttgccgacggtgaaggtcttggcgtcggctggaacgatcacggccggctccagggcgaaaccgttggcggtcacgatctggccgttagagtccaggtggaaagtaccgtcacgggtgtaggaagttgtgccgtccggttgcaggatctggaagaaaccgcggccgttgatggccatgtccagcggctggccggtttgctgcaggttaccggcgctgaagttcttctgggtgccgacgatctgcacaccggtacccaattgcaggcccgacggcagttcgctgtcctgggtcgactgggcgcctggctgcttcttgatctgatagagcaagtcctggaactcggcacggtcacgtttgaaacccgtggtcgacacgttggccaggttgttggaaatggtggtcaggttggtgtcctgggcggacaggcctgttttggcaacccatagagccggaagcatgctgttctccttcgtgcgcctgtttgttggcgctgcgccgcaaaattagtgtgttggatcagctcatctgcatgacgcgcgtcatggcctgatcgtcttctttagcgctgttcatcatcttgatgtgcagctcgaactgcttggaaagcgccagcaccgcagtcatttcttccacggcattgacgttgctcgcctgcaggaagcccgaggtcagcttgacgttcgcgtcggcctgggccggctggccatccttggtatggatggtgccgtcgaggcccttattcatgttcttcaggtccggctggaccagcttgatgcggtccacttcagccatcacccgcgggccttcgcccatggcgcggatgctgatggtgccgtcggaacccacttcgattttctgctggggcggcacggcaatcgggccaccattgcccatgatcggcataccgttgccggcgcgcagcacgcccaatgcatcaacgttcatgctggcgctgcgcacgtaggcttcgctgccatcaggggtctgcacggccatccagccatcgccgttgacggccacgtccaggtcacgaccggtctcgatcattgcgccaggggtgaagtcggtggccggacgctcagtcatggcaaacgcccgcgccggaaagctgtcgccgaacaccggcatcgaacgcgcctgctccaggtcacgttggaaaccattggtggaaatgttcgccaggttgttggcatgggccttctgcgccagagcattctggctggcgccggtcattgccacataaaggtacttgtccacgcttcttcctctttctgacggacgcttgccgcccaccgctgtactgatgaggcttaagcaatttgcgaaccaacttttgaaaagagggagaagtgcaggcggggcgggggtttgccgtgaggtggggggatttcagggttgagcgtgagtcgaaaaaacggcggactactgccgcctgcggcaagtcccgtccttgaaaacgacaaagatcaaatgtgggagggggcttgcccccgatggcggtggatcagccacatcacagctggctgacactctgccatcgggggcaagccccctcccacatggggttatttatcggtcttgaggatttcgtaatcgcgcagcttattcgcgatggtggtgtgcgacacccccagacgcttgcccatctgccgactgctgggatgctcggcatacaaagcttccagtaccgccttctcaaatcgcccgacaatctcatccaggccaccctccagcgaaaaatcgccaagcggctgacgcacgccataatccggcaaccggatatgctcggccttgaccgtcccgccgtcgcacaacgacaccgcctggaacagcacgttttccaactgccgcacgttgcctggccagtggtagtgactcaggcgctccatcgcggcgggcgccaacctgggcagcgggcaaccgatctgccggctggcctggtcgagaaagtgctcgaccaacggcgccaggccatcgaggcattcgcgcaatggcgggatatgcagggacagcacattgaggcggtggtagaggtcctggcggaattcgccacgggcgcacagctcggacaaatccacttgggtggcgcagatcacccgcacatccaggtacacctcttcatcgctgccgacgcgacggaagcagccgtcctgcaaaaagcgcagcagcttcacctgcaagcgcgcactcatttcccccacaccgtcgagaaacaacgtaccgcccgccgtcagctccagcaggcccagcttgccttcagccctggcaccctcgaaggcgccagggccgtagccgaacaactcggtctcggccatcgactcaggcaggccggcgcagttgagcgccatcaacggtgattgcccacgcgggctggccaggtgacaggcccgcgccagcagctccttgccggtgccggtttcgccttctattaatagcggcgcatccagcggtgccatgcgtcgggcttcgcgcaccacggcggccatgactctggagctttggaagatgctgtcaaagccacgcagttcctgcttgcgcacgttgtagatgcgctcaccgacgcggtcggcgcggtgcagggtcagcacagcgccggccatggcctcgctgtcgtcatgctcggaggattgcagcggcgcgatgtccgccaggaacacgtcgcccttgaccttgacccgcaggccgttgattcgcgacttgctcgcgcgcaccagctccggcaagtcaaagtcctcggcgtagcgcgacaacggaatgcccggcacctcatccacccgcaccccgagcaactgcgccgcggcgcggttggcagcgacgatggaaccgcccatgtcgatggacaacaccggaaactccagggcacccagcagtgcattgagctccatatgccggcgctcgctgggcatcagccctaccctctttacgccaaacaccccggcaatcgcctcgaattgcgggcgcagcgcctggaactgcatgttcaccagattcggacaaaacaggtagatggcattgccatgctcaccgccgacctcgcccttggcgacgttgacgccgtattccaccagcaggttgaggatgtcccgcaggatgccgatgcggttctggcagtgcactttgatacgcatgaagaggcccgaaaagtggggaggcgccgcgtctttttgtcgctgggcgcagatagtcgtcaagattatgtgacagccacagcgactttcccagcccaatgcagcggtcaacctcacaagcgtaacgaatagtttacgaaaagcagtaatttttcctacatagaggcgttttaaacagatggaatctggccccgcacgggttatcaataggctcatcgcaggacataacaagaacgaatgcctagcaggagagccgtatgaagcagacgcagtacgtggcccgcgagcccgatgcgcaaggttttatccactacccgccggaagaacacgcggtgtggaacaccctgatcactcgccagttgaaagtgatcgagggtcgcgcctgccaggaatacctggacggcatcgataaactcgacctgccccacgatcgcatcccgcaactgggcgaaatcaacaaagtgctggccgacaccaccggctggcaggtcgcccgtgtgccggcgctgatccccttccagaccttcttcgaattgctcgccagcaagcagtttccagtggcgacctttatccgcacccgcgaagaactggactacctgcaagagccagatattttccacgagatcttcggccactgcccgttgctgaccaacccctggttcgccgaattcacccacacctacggcaagctcggcctggcggccaccaaggagcaacgggtgtacttggcgcgcctgtactggatgaccatcgaattcggtctggtggacacccccgaaggtcgacgcatctacggtggcggcattctgtcgtcgcccaaggaaacggtgtacagcctgtcgtccgagcccgaacaccaggtgttcgacccgctggaagccatgcgtacgccgtaccgcatcgacatcctgcaaccgctgtacttcgtgctgcccaatctgaagcgcctgtttgaagtggcacaggaggacatcatgggcatggtcgagcgcggcatgcagttgggtctgcacgcgccgaagtttccaccgaaacccaaagcggcttgaaccttacatcttcaggccaggtgagtctgttccctggccgcgcgttgctttagggtgacgctactgatcttcaaacactcgaattcaggacaccatcatgaccaccttgaaccaagcccattgcgaagcctgccgcgccgatgccccgcaagtcagcgacgaagaactgccggtactgctcaagcagatccctgactggaacatcgaagtgcgcgacggcgtgatgcaactggaaaaggttttcctgttcaagaacttcaaattcgccctggcgttcaccaacgccatgggtgaaatctccgaagccgaaggccatcacccaggcctgctcaccgagtggggcaaggtcaccgtgacctggtggagccactccatcaagggcctgcatcgcaacgacttcatcatggccgcgcgcaccgacgaagtggccaaggacgccgagggccgcaagtaatgcacttcgatgccattggccgtgtacccggcgacccgatcctcgggctgatggacctgtacgcccaggacgccaacccgaacaaattcgacctgggcgtgggcgtctataaagatgaccagggcctgacgccgattccacattcggtgaagctggccgagcaacgcctggtggacacacagaccaccaagacctacatcggcggccacggcaatgccgcgttcggcaagctgatcagcgagctggtgctcggcgccgactccccgctgctgcgcgaccggcgtgccggcgccacccagaccccaggcggcaccggtgccctgcgtttgagcgccgattttatcgcgcaaaacctgccgggccgtggcgtatggctgagcaacccgacctggccgatccacgaaaccatcttcgccaaggccggcctcccggtcagtcattacccctacgtgggcgctgacaatcgcctggacgtggcggcgatgctcgccagcttgtccagcgtgccccagggcgatgtcgtgctgctgcatgcctgctgccacaacccgaccgggttcgacctgtcccaggatgactggcgccgggtgctgcagatcgtgcgcgagcgccagttgctgccactgatcgacttcgcctatcaaggctttggcgacggcctggaacaggacgcctgggcggtccggctatttgcggccgagttgccggaagtgctggtcaccagctcctgctcgaaaaacttcggcttgtacagcgaccgtgtcggcgcgctgatcgtctgcgcggcggatgccgagaaactgacagacgtgcgcagccaactggcgaacacagcgcgcaacctgtggtcgacgccgccggaccatggtgcggcggtggtggcaacgatcctcggtgatgccgagctgaaaaagcagtggagcgatgaggttgaagccatgcgctcgcggatcgcacacctgcgctccggcttggtggaggcgttggcgccacacggtctatcggagcgttttgcgcacatcggcgcgcagcgtgggatgttttcctataccggcttgagtgccgagcaggtgaagcaactgcgtgagaagcacagtgtgtatatggtgagttcgggaagggctaacgtggccgggattgatgccacgcggttgacgctgctggccgaagccatcgccgacgtttcccgctgacgaaacccggaataaatgtgggagggggcttgccccctcccacatttggcttgtgtgcaacttcagccggcgaccatctcggccttgagctgcgcctcttttgcctgcgcatccgccaaccgatacaactcgatactcccatcccagtgctcgatcaacgccgtgcatgactccacccaatccccgcaattgaggtaatccacctcgcccaccttgcgaatctccgcatggtgaatatgcccgcacaccactccatgcaactcgcgtttggtcacctcgtgggcgatggcttcttcgaaatcgctgatgaagttcaccgccgtcttgaccttgtgcttgaggtacgccgacagcgaccaatagccatagccatagcgcgcgcgccaatggttcagccagcggttgagcgtgagggtgaattcgtaggccgaatcgccgaggaacgccagccagcggtgatagcgggtgatcacgtcgaactggtcgccgtggatcaccaacagatgccgaccatcggccgtcacgtgaacggcttcgtccaccagctggatattgcccaggatcagtttggaataacggcgcaggaattcgtcatggttaccggtgacatagatgacctcggtgccgcgcttggccatggtcagcaggcgacggatcacgttggtgtgggcctggggccaatacatgccgccacgcagtttccagccgtcaatgatgtcgccgaccaggtagaccttgtcggcgtgatagcccttgagaaattgcgacagatgctcagcctggcaatcccgggtgcccaggtgcacatcggaaatccacagggtacgcacccgttgcttgcggctgggcttggtgaactcggcactggtcatgggcatccctcgacggtgttttcgcgagcttgcgccctggcgattaatagcccatgacaactgtgcgtcagtctgatgacagcgcctgccggccgcaaagcgttgtagactgccggcttgccgccccggagatcactatgggacccgccctcaccctgcgccattacctcgaagcgcccctcgcccacagccatgatcatgcgcagttggtgttcggcctgtccgggcacctggacctggaagtcgatgggcgtggcagccaggtccgcgaaagcagcgtgatggtgctgcccttctcggcccaccatgcgtgcggcagccgtgatggcagccggtgcctggtgctggatgtgcccaccgagcattgggtgctgcaatcgctgggcgaacatgccgacgccagccgccgcctgctcgaccaaccggcgcggctggccctggatacgcggcagagccagttggtgcaatggctggcgcaaagcccggtgcatgacccgctgatcgtccagcaaggggcggtgctgttgctggccagcctcaatcatccccaggcccaacccctgccgggacggcgcctgccgtacgcggcgttcaatgcgcacatcgagcgccaccttgcgcacccgctgcaggtggcggacctggcgcgtatcgccgacctgtcggtggcacgtttacacgcacgctttatcgccgaatgcgggcaaacgccgatggactacatccgcagccgtcgcctgcagatggccttggacctgctgcgcaaaacgccgctacccatcggtgaagtcgccgatcgcgtcggctacacctcgcaaagcgcctttgccgccgcgatgctgcgtgagttcggcgcatcaccgggggcattgcgccgcaacgcgtaggaagagtcctgcgataaaaaacgcgagccgcacgacagacatccacaccggcgccccactagactgcgcacttgccacccgcttgtctcaaggatcgcaatgactccccgctcagccctcggcgccctgcatatcggcgcattgatgtttggccttaccggcgtattcggcaaactcgcggccgcttcgccggccatcatcgtgtttggtcgcgcggtgtttgccgtggtggctcttgcggtgtttgcccggttcgccagcaacacggcgtggaagacactggaactgcgcgactggcgccggctgctggtgagcggcgtgttgctggcagcgcactgggtgaccttctttatcgccgtcaaggtggccggcgtggccgtcgcgacactgggcttcaccgcgttcccggcgtttaccgtgatcctcgaagggttgattttccgcgagcggatccgccccaacgaaatcgtgctggtggtgctggtcagcgtcgggctggtgctggtcaccccagacttcaacctcgccagcgaagccactggcggcttgctctgggggatcgcctcggggctgttgttttcactgttatcgctgaacaaccgcgccagctccggccgcatccccgcagtgcaggcggcgttgtgccagaacgtggtggtcgctgtttgcctgttgccggtggcggcaccggggctgaccgaagtacgggcaatcgactggctgtggatcggcttgctcggcgtgttctgcaccggcctggcccacagcctgtttgtcgccagcctcgcggtgatcaaggcacgcaccgcctcggtggtgttcgccatggagccggtttacggcatcaccgccgcctggctgctgtttgccgaaacgccgacgctgcgcatgctgctgggtggcgcgctgatcatcgtcgccattgtgctgtcggggttgatgggcagcgccagccaggccaaacagcccactgcaacggcctgatctatactttcaatatccgcaacagtcagcagtcgttcaacggataaccgacagctcgacgacagccagggtgtgttctgaagttgctgcaagcgagtggtcacaacctcaacgcgatgcgggagctttaccatggaaatgctcatcagcttattggtacagatcatcagcggggcggtcggcggcaacgtcgccggcatgaccaaacagagcctcgggaccgggctcaatacactgatcggtggtgtcggcggactggtgttgggtcaggtcgccgcggcattcacgggcacctcgggcggtgaagcgctggatgtagcggcagttggcagcaacattgtggggggtgggataggcggcctcatactgacgtggctggttggcttcatcaaacacaagatggccaccaaatagggctgcactagagggtcaccgcccccaataaggcggtgactttcactgcgtacggtcgttgtgccccaggtcacgctgcgggtcgatcctgtcgcgtacgcgctgcttgagcaccttggcttcggggaaaccaccgtccgccttgcgttcccagatctgcacgccatcgcaggtgatgcgaaacgcgccgccggtggccggctcgagtgagaccttgcccaggtcatcggcaaatgtactcaacagctcctgcgccagccacgcggcgcgcagcagccactggcactgggtgcaataggtgatgacgatctcgggtttgcttgtggacataacttgagaagctcctggcataacgggctcggcggatcgagtggctataataccggcctttatcgcccagccccgagattcctgatgcgccgcctgctgtcctgcctgttgctgtgcctgctccctctgcttgccgacgccattgaagcgccccgcccgaaaatcggcctggtgctgtccggcggcgccgcccgtggcctggcccatatcggcgtgctcaaggcgctggaagagcaaggtatccagatcgacgcgattgccggcaccagcatgggcgcggtgatcggagggctgtatgcgtcgggctacaagatcgatgagctggaaaaactggcgctgagtatcgactggcaacaggccttgtccgacgcaccaccccgcgaagacgtaccgttccgacgcaagcaggatgaccgggacttcctggtcaagcagaaactcagcttccgcgacgacggcagcctgggcctgccactgggtgtgatccagggccagaacctggcgctgctgctggaaagcatgttcgcccacaccagcaacacgcgcaatttcgacaagctgcctatccccttccgcgcggtggccaccgatatcaccaccggtgaaaaggtggtgttccacaagggccacctgccccaggtgatccgcgccagcatgtcgatcccggcggtattcgccccggtggaactggacggccggctgctagtggacggcggcatgaccgacaacatcccgctggatgtggcgcgggagatgggcgtggacatcgccattgtcgtggacatcggcaccccgctgcgttcgcgcaagcaactggccacggtggtggatgtgctcaaccagtccatcaccctgatgacccgccgcaattccgaggaacaactcaaggacctgcaccccaaggacgttctgatccagccgcccctcgccgcctatggcgtgaccgacttcggccgcgccaaggacatgatcgacgccggctaccgcgccacccgcgcccttgacgtacgcctggcccacctgcgccctgccgagccggtcgacccgcaattggtggccgcccgcacaccgggcgaacgcaccccggtgatcaccgcgatcagcgtagagaacgattcgaaagtcagcgacgacgtgatccgctactacattcgccagcccctgggcgagccgctcaacctgggccgcctgcaaaccgacatgggcaccctgtacggcctggattatttcgagcaggtgcaataccgcgtggtcaagaaaggccaggacaacaccctggtaatcagcgcgcggggcaagcgcagcggcaccgattacctgcgcctgggcctgaacttgtcggatgacatgcgcggcgacagcgccttcaacctcggcgccagctaccgcatgaatggcatcaaccggctcggtgcggaatggctgacgcgggtgcagatcggtgaccgccaggagctgtacagcgagttctaccagccgatggacaccggctcgcgctactttgtcgcaccgtacatcagggcccaggcgcagaacgtcgagctgaccctggacaacgacccgatctccgaataccgcctggagcgctacggtttcggcttgaacgtcgggcggcagatcggcaacagcggcgagatccgcttcggcgtcggcgaagcctggggcaaggcggatgtgcgcatcggcgaccgggattcgcccagtgtgagtttcagcgaagggttctatgaattgaaatactccttcgactccctggacaacgtgtacttcccccacagcggcgaagacatcggcctggccttgcgcgaattcgaacctgggctgggctcggaccagcgctaccgccaatgggagttcaagctcgacaaagccatgagccacggcccggacaccctggtgctgggtggacgctacgggcgcaccctggatgattcggatgtggtgatttcaagcttcctgctggggggcgcgcggcagctctcaggcttccgccaggatgcgatctcggggcagaacatcagcctgatgcgggcggtgtactaccgcaggctcacgcctcgctcgtacttgccgctggatttcccgctgtacctgggtgcgtcactggagcgcggccgggcatggaacaacgacaatgaattcgacagcggctatatcaatgcggcgagtatcttcctggggttcgatacgccgttggggccgctgaacttcagctatgggttcaacgatgataaccagaaggcggtgtatctgaacctggggcagacgttttagcgttttgctcagaacccgattgcgtagagcggcgctgttgtggcgagcgggcttgccccgcgctggggtgcgcagcggccccaaaaacagacgactgatttctaactgaaaaaacgcggtgactttagtggggctgcttcgcagcccaacgcggggcaagcccgcttaccacaacagccctactcaccacagtaagacagcacagtggtttcttcaggacttttccagattcgccaggatgtgcccatgcacgcgcatgcacacgctcaagtcggcttcgtctacccccacaaacagttcgtggcgcagggcggtggcgatggtttcgatttgttcgatcaagggccgggcggtatcacacagcacgatgcgcttggcacgacggtcttccaccacggcctggcgttgcaccaggccttggccttcgaggctgtccagcaggcgagccagtgtcggcccttcgacaccaacgctttgcgccagctcacgctgggtgggtgcctcttcaaaacgagccaagtgcagcagaaccagccagcgcgcttgggataaaccaagccccgccaaacggcggtccagctcggcgcgccacccacgggacatttgcgccagctgcatgccaaaacgatgttgatcggttaacgacataaaaaactcaatgtttagactgaaaataaagtgtggctaattattagtcagctaagcatgagctttgcccgtaggcaagagttgctatgtactgattcgttacattgtcgtaattggcacactaaatttcgaattcggactgcaaagccgcgcgcacgcagtacaaaaccccctctggaacacgcccggtgaacagcggcgctatctccgcaacaggtggcaattcgccctctccgtcgaggaacgcatcctggatttcgccgagcagatcctccggtaaatcaagggcttgctccaacgacaattgctgcttgccgatggattcggcaagcaaggtgtagacgtttttttctgaacattgcagctgaccggcgatctgcatcggggtcatgccggcgcgtgccaggctgatcagttcgtggcggatatcagcgacctccttcggcgcttcggcctggccgccgagcacttcgaggaacgcctggccgtaacgctccaacttgcgcgcacccacgccgctgacccgcgccatctcggccatggtggtgggttgttcgcgcaacatttccaacagcgtcgagtcggggaaaatgacgtacggcggcacgctgtgttcctgtgccagtttgcgccgcagggtgcgcaaagcttcccactgctcgcgctcctcgccacgcaccagttggctggcctgactggtgctggtcttggcggtggtctgcggcttgaggtcgcggcgcaactccaggctgacctcacccttgagcaacggccggcaactgtcattcaagcgaaggccgccgaagccttcgatatcgatgtccactaggccgcgcgcaaccatctgtcggaacaacgagcgccactcgccttctgcgcgggccttgccgacgccatacaccgaaagtttctcgtggccaaagctgcgcactttctcgttgtccttgcccagcaagacatccaccaagtggcccacgccataacgctgaccggtgcggtagatggcggacaagccctggcgcgccggctcggtggcatcccaggtctgcacgccatcgacgcagttatcgcaatgaccgcaaggttcgggcatgtcttcatcgaaatatgccagcagggtctggcgccggcagcgggtttcctcgcacagcgagagcatcgcgtcgagcttgtgctgttccaggcgcttgtgacgctcgtcgccctcggagttctgcagcatctgcttgagcatcaccacgtcctgcaggccatagaccatccaggcatccgccggcaggccatcacggccggcgcgaccggtttcctggtagtacgcctcgagggatttgggcaggtccatgtgcgccacgaagcgcacgttggatttgtcgatgcccatgccgaacgcgatggtggccaccatgatcaggccttcctcgttgaggaaacgcttctggtgcgccgaacgcgtttcgttgggcaggccggcgtggtacggcaacgccgggtagccttgctcgcagaggaatgcggcgacttcatcgactttcttgcgcgacaggcaataaacgatgcccgcatcgctgcgccgttcggagagaaacgccagcaactgcttgcgcggctgttccttgggcacgatgcgatagaagatattcggtcggtcgaagcttgagaggaagcgctcagcgttctgcagatgcaggcgctcgacgatttcttcgcgggtgcgcttgtcggcagtcgcggtcaacgcaatgcgcggcacatcgggaaacagctccgccaactggccgagttgcaggtactcgcggcggaagtcatggccccattgcgatacgcagtgggcttcgtcgatggcgaacagggcgatttccaggctctgcaaaaacgccagcatgcgcggctgtaccaggcgctcgggcgccagatagagcatcttcacttcaccgcgcttgatgcgagcggccaggtcacgctgctgttcggcactgagggtagaattcaacgatgcggcggcgacacccagctcttccagggttgccacctggtcgtccatcaatgcaatcaaaggcgataccaccaccgccaagccattgcgcaacagtgccggcacctggaaacacaaggacttgccgccaccggtaggcatcaggaccagtgcgtcaccgccactggccacgcgctcaatgatcgcaccctggcggccacgaaaactgtcgtagccgaagatgtccttgaggacgcgttgagcctgctcgagcatgtaaaactccaaaatggtgccgaaatccctctgtacaggctggccgaaaaaacacgctttcacgggaaataatccgtaagcgaagttttcgcgggctggcgcttggcctgcaagggcatcacaaaacgcggcagtatacccgagcgatccccggcaaagggcatcactgacgaatagcggccgcgatctaaaatgccgtgcggctggcctgggcgctcaagaaagcctagaattcagcatcgtttattcccaaggtaactcttcaatgtccttcgctgagcaactaacccgcctgcaagccttcctcgacgccgatgagctgcatgacgaggcgctggactacgtggccgcccacggctacctgaccgccttgtcgatctgctccgaggtcgtgcctgaccgtgaatggatcgatgcgctgttcgccgaagagccgcactacaccgacgccgcccaacgcgaagaaatcgaagccaccctgctggccctcaaggcccacatcggtcgccaactggcctccgacgaagagttcgagctgccgtgcgaactggaccttggcgaagagccggatgattccgacctgcgcggctggtgcattggcttcatggaaggcgtgttcctgcgtgaagccgcctggttcgaaaccgccgaggaagaagtcagcgaaatgctgctgccgatcatggtcggttcgggtctgttcgacgaccagccggagttctccgacatcgccgccgacgccaacctgatggacgacatgatcgtgcagatcccggaagccctcaccgcgctgtacctgctgtgcaacgcccctgacgaaaagccggcgatcctcaagccacgtcaccactgagtcgcttgcccgtgacacccatgggcaaccgtccgctgctcctgcgctacctgctgctggccattggttggttgagcgtagcgctgggggtgatcggcattttcctaccggtattgccgaccacgcccttcctgctgctcgccgccgcctgcttcgcccgaagctccccacgtttctaccactggttggtgcagcacccgcgccttggcccgtggatccgtgattacctggacggcaacggcatcccgctcaaaggcaaggtctacgccatcggcttgatgtggctgagcatcggcgtgtcctgctatttagtgccattaccgtgggcgcgcggcttcatgctgaccagcgccgtgctggtgacaatctacatcctgcgccagaaaaccctgccaccgcgctgaatgacctgcgacattcgatcccacacgaccttggtcgacactgactaaccccaagcatcatgcgagactgtccaaccgggcctggaatgcccgggtgttcctatgctcggagttaccatgtcgctgtccagcgggctgatcgccgccgttgccctggcctatatggccattatgtttgccatcgccttctacggagaccgccgccgtgcgccactgccgccgcgcatgcgtgcctgggtgtacagcctgtcgctggcggtttactgcaccagttggaccttctttggcgccgtaggccaggccgccgaacagctgtgggcgtttttaccgatctacctgggaccggtgctgctgctggtcctggcaccctgggtgctgcagaagatgattctgatcagcaagcaggaaaacatcacctccatcgccgacttcattgccgcgcgctatggcaaatcccaatcgctggcggtggtggtcgcactcatctgcctagtcggcgtattgccctatatcgccctgcagctcaaaggcatcgtgctcggggtgaacctgttgatcggcgctggggccgacaccaccggcacccgcgcccaggacaccgcgctgatcgtgtcgctggtgctggcactgttcaccatcgtatttggtacgcgcaacctcgacgcgacggagcaccaccgtggcatggtgctggcgattgcgtttgaatcgctggtcaagctgttcgcgtttctggcggtgggcgcgtttgtgacctacggcctgtacgacggtttcggcgatttgttcagccaagccatgctggcaccacgcctggaggagttctggaaggagaccgtcaactggccgtcgatggtggtgcagaccggcgtggcgatgatggcgatcatctgcctgcctcggcagtttcatgtcacggtggtggaaaacatcgaccctcaggacctgcgcctggccaaatgggtgttccccgcctacctgattctggccgcactgtttgtagtaccgatcgccttgggcggcaagatgatgctgccgggctcggtgctgccagactcctacgtaatcagcctgcccatggccgaagcccatccggcgctggcggtactggcctttatcggcggtgcctcggcggccaccggcatggtgatcgtggcaagcatcgccttgtcgaccatggtctccaacgacatgctgctaccgtggttgctgcgccgctccagcgccgagcgcccgttcgaagtgttccgccactggatgctgtcggtacgccgggtcagcatcgtgatcatcctgttgctggcctacgtcagttaccgcctgctgggctcgtccgccagcctggcaaccatcggtcagatcgcctttgccgccgtgacccagctggcaccggcgatgctcggcgcgctgtattggaagcaggccaaccgacgcggcgtatttgccgggctggcagcgggcactttcctgtggttctacaccttggtcctaccggtaacggcgaaaagcctgggctggtccctcagccttttcccaggactgacgtggatgcattcccacccactgggtctgtccgtcacttcgttgaccttgggtaccgtgttttctctggcaggtaacttcacgctgttcgtatgggtatcgatgctgtcgcgtacgcgggtttccgaacactggcaagccgggcgttttattggccaggaaatcagccaacgcgccagcgcccgctcgatgctatcggtgcagatcagtgatttgctcagcctggccgcgcgctttgtgggtgaagaacgcgcccagcagagttttatccgcttcgcctatcgccagggcaaaggcttcaaccccaaccagaatgccgacaacgactggatcgcgcacaccgagcgcttgctggctggcgtactcggggcgtcctcgacccgcgcagtggtgaaagccgccattgaagggcgcgaaatgcagctggaggacgtcgtacgcatcgccgacgaagcatcggaagtgctgcagttcaaccgcgcattgctgcaaggcgctatcgagaacatcacccagggcatcagcgtggtcgaccagtccctcaagctggtggcctggaaccggcgttacctggagctgttcaactacccggacggactgatcagcgtcggccggccgattgccgacatcatccgctacaacgccgaacgtgggttgtgcgggccaggtgaggccgaagtgcacgtggcgcgacgcctgcactggatgcgccagggtcgcgcgcacacctctgaacgcttgtttcccaatggtcgtgtgatcgagctgatcggcaacccgatgcccggcggcggcttcgtgatgagtttcaccgacatcaccgcgttccgtgaagccgagcaggccctcaccgaggccaacgaaggcctggaacaacgggtgaccgagcgcacccacgaactgtcgcagctgaacgtggcgctcaccgacgccaagggcgtggccgagtccgccagccagtcgaagacgcggttcctggcggcggtcagccatgacctgatgcaaccgctgaatgccgcacgcctgttctccgccgccctctcccaccagaacgacggcctgtccgacgaggcccggcaattggtgcagcacctggacagctcactgcgttccgccgaagacctgatcagcgacctgctggatatctcgcgcctggaaaacggcaagatcaacccacagcgccagccttttgtgcttaacgaactgttcgacaccctgggcgccgagttcaaggcgctggcccaggagcaaggtctgcgcttccgcctgcgcggcagtcgtttgcgcgtggacagcgacatcaagttgctccgcaggattctgcagaactttcttaccaacgccttccgctatgccgacggcccggtgctgctcggcgtacgccgacgcaaaggcgagctgtgcctggaagtatgggaccgtggcccggggatcccgctggataaacaaaaggtgatcttcgaagagttcaagcgcctggacagccaccagacccgcgccgagaaaggcctggggctgggcctggcgatcgccgacggcctttgccgcgtgctgggccaccgcctgagtgtgcgttcatggcccggcaagggcagcgtcttcagcgtgcgcgtgccgctggcccgcaaccaggccagcccgcaggtcaagacgccgcaggaaaccggcttgccgctgagcggtgcgcaggtgctgtgcgtggataacgaagagagcatcctgatcggcatgcgcagcttgttgacgcgctggggctgcgaagtctggaccgccaccgaccaggcgcaatgcgcggcattgctggctgatggcgtgcgccctcaattggcgctggtggactaccacctggaccatggcgaaaccggtactgaactgatgggttggctgcgcgcgcaattggcggagccgattcccggtgtggtgatcagtgctgacggtcgcccggagatggtggccgaggtgcatgcggcggggttggattacctggccaagccggtgaagccggcggccttgagggcgttgctgagccggcacctgccgttgtaggagacggcaagccggcgcctacaattactcgggcagatgggccacgccatcggagtcggtcatcgcccgctccagcagatcagcgggaaggctcttactggctcgagcaccgagcaacctcaattgctcagtccggctgaccagatttccgcgtccatctgtcagcttgttacgcgctgcgctgtaagccttatccaactgctgtaaacggttacccacttcatccaggtcctggataaacaacacgaacttgtcgtagagccaaccggcgcgctcggcaatttcccgggcgttctggctctggcgctcctgcttccacaggctgtcgatcacacgcagggtggccagcaacgtggtcgggctgacgatcacgatatggcggtcgaaggcttcctggaacaggttcggctcggcctgcaacgcagcggaaaacgctgcttcaataggcacgaacagcaacacgaaatccaggctgtgcaggccttccagacgtttgtaatccttgctcgccagacctttgacgtgattgcgcagcgacagtacgtgctgtttcagggccgcctggccgatgacctcatcatccgccgccacgtattgttggtacgcggtgaggctgaccttggagtccaccaccacctgcttgtcaccgggcaacatgatcagcacgtccggctggaagcgctcgccatccgggcccttgaggctaacctgggtctggtactcacggcctttttccaggcccgcatgctccagcacccgctcaagaatcagctcgccccagttgccttgggttttctggcccttcaaagcacgggtcaggttggtggcttcgtccgacagacgcaggttcagttgctgcaggcgctccagctctttagccagggaaaaacgttcgcgggcctcgttctggtagctttcttccacgcgtttttcgaaggactggatgcgctctttcaacggatcaagcaattggcccaggcgctcctggctggtttcggcgaagcgctgttcgcgctcatcgaagatcttgccggccagctcggcgaactgcgcgcgcagctcatcccgtgagccttgcaggtcagtgaggcgctgttgatggctgtcctgttgttcgcgcagttcggcgcgcaaggccgctgacagagcgtcgaggcggcgcagctcggtctccttggcgctgcggtcgaggttccaggcgtgggcggcgtcgcgggcattgtcgcggtcgatctgcagcagttcgacttcgcggcgtacggccgccaggtcggcctgtttggcagcattcgcctggctcagatcgctgatctcgtcgcggctggcatccaactgtgcggcgaggccctcctgggccagttgcgcagtggccaggcgctcttcgagcagctcccagccggtcatgcgcgcggtcagtcgccgctgaagctgccagcacagcgccaataaaggcacggcagcgcctgcgaggcccagggcaatactggtccagtcaaaaaccatagacatgtctgccatcaccgaaaaaaagcaaggttagcggagcccagggcctgaggacagctcagtcttcgacctggcccagttcacgctgggcgcgacggtcaccggcgcgagccgccaggcgcaacaggtcgtggccgatgcggcggtcacgggcattcccgcactcacggcacatcagttggcccaggcggctttgggcagcgaccacgccttcacgggcgggctgcttgagcaagcgcccggcaaagtgtttgatgttggtgttatgacccaggcgcggactgtcgagcagccacaaggcaactttcaaggagaagcgcttgggggcggtaacagtttgaggggtatcggtaacagaaggtgatactgagcgaaacttcataaagcactgtgggacagatcggaaggcgcgccactctactctttttttcgtacaggtaaagctgaaaaaactctgcacgcccgttctagagcaagcgctcgggacaatccacagaagctgtggataactcagtggacaacccccctttaactcgcgcaaagccccatggaatgggggtcgcagtcaaactgacgattttttcaccaataaaaaaaagccagatttttcattgacttaaatttccattgcaggcaaatggcggcccggtagagcagttgacagcgcggttacacctcccacaactaatgtgcacaagtacccatccgacggttatatcgctggcgttttttgaagcaacttgctgcaaagatgttaccgccggggcaaaacagggacttttcaaatctttcctggctcgccacactccccgacctacagcgcaacggtggaggggtcgatgaaaggaattctgttgttcgcggtgctgctcctggccatctgcgccatttcattggggatcaatgcggcactgccctctccggatggggcactgttcgccatcgccatcctgctgtcggcggcgttcacggctgtgagcttgtgcattgagctcggcgaaggccggatcaacgatatgggtgatgtgatgaaagtggtcgagaccggccagtccctgcgcttgaccctcgccgcctatggcctgggttgctcgctggcagcagcagccactgtgctggtctatcgaggcctgctgggcagctgattgaagttttttggctaacccacttcccttacctgtttcaatccgttactatccgcggcgttagtaccaagctgaaagtcaattctggtcgaacaattcccctgcacaacacgggatcgaccacctcgatggtttccaggtatcacttgcgacgacactgcctttgaacaagcaaagggtgccgcgaagtttccatactctgaccgaaccaacctgcaaattgatcaggatcttcaccctgggcccagaacctttgcccctgttgtgttgcctgccctcctaagtacctacctgccagcccaagcgcgcctaacttaatagcgcttcaaactggctgctttgttccagtcgggttcttcgtttgatcaatggtgatcaacgttactggaacgttttaatacggcacggatcttatttcgtgtcatttgtaggaacacccataatatgaacgctcaaatccacactcaggatgccattcgcaccctaaccaacgcttttgctccaatgaactgcctgatcatggctgcgcgcaaaggctgcttcagcttcaccctggtcaacgaacacggcattgctcgtcacagcgaacgcctgtaccccgatcaatactccagcgcagaaccgctgcaggccgtgatcgagcgtacccgtcaggcattgaccgcctgaccgacccgagtcgctgaaacacaaaaaccctgcttgaacagcagggttttttattgcccggaatttaccggctcagctattgcactaagttcaaatagatataaacattataactaaatgaagaagatgttttaaaaacagtcctttacatcgtaaatatgacactacacttcaactcaagcggcatgatccgcttccggcgagcctgagatccgatccactgctgccaagcccccaccttctcaggcttcgtcgaccactttcacggattgaggcgtgtatgggtatcgctgccagcgaattgtgtcgttatgtgatcaggccgacgttgatgtacctcggccgacataacccgacggccgagtccctgctgctgggcatcgccgccagccagtcggaactgggttccgccttgcacgaccggcgtggccacggcctgtacagcatcaccgaaccgcgccaccgtgccttgtgggacagctacctggcgctggaccccgagcgcgccagcctggtacgcggcctcgctagccaacacgcgttcctcagcgcaccgcaacttgagctcacggtcaacctgcgttacgccaccgccatcgcctggctcctggtggaacagcacacccctgcactgcccccgcccggtgatgtgctggccatggcacgtatctggaaagaaatttttcatccacaaggaaggctgcgcgatttcactcaagcctggcaaacctgtgtttcacccatgaatcaggtggtttgctgaccgggcaatttgcaagattcgccaaaaaaccaggattttggtcggattgtcctacaaaaccgctctatctcctgcattacagcctatagcgcgatgttaaatttattgttactttccgcagcggtgatcaccacggagttctaataatgaaaaaagtaatgctcaagaccacacttagcctcgccgttgccatggcctcttcccacgtgttcgcaagtggctttgcccttaacgaacaagacgtcgcaggaatgggaacgggtttcgcaggccgctcttcttctgccgaaaatgcaagtaccgtttatggtaaccctgccggtatggctcgccttgaaggccagcaagtcactggcggtgttgcagcgattgatgcctcaagcaacatcaaggatgtcagcggccgctccacaggcacgaacaaaggcgatatggtgcctttcactgccgttccttttgggttctacaccaataaactcaacgaacaatgggctgtcggtttcggcgtctatgctccgtttggcctggtgacagactacgaaagtggcttccaaggcaaagcttttggcagcaaaagcgaagtgacggtcatcaccttccagcctacggtgagctacgccttcaacgatcgggtttccattggttttggcccgactatcaaccgtatcgctggtacgctcgagtccgatatcaacctaccagtccctggtaccggcgccaacaacatcaagatcaagggagatgacaccgccgtcggcttcaatgccggcctgctggttcaagccactgatacaactcgcgtgggcctgacctaccactcgaaagtgaaatacaagctcgaaggccatactgaagtgaccaaaggcaccaacgttccggctgcgctgctgaacaatggccgctacgacgcgtcgctgaagatcgacacgcctgaatcctgggacctctcggttactcaagacatgagcgacgcgtggaaactctacgcaggcgctacatggacccgttggagccgactgaaagacattaccgtcaacaacgaaggtgtatcggccgcagccggtagcggtgctttggctccgcaaattgtcggcaccatcaaagaagaccagaactggcacgacacttgggcctatgccttgggtacctcgtatcgcgtcaccaagcaagtggtgctgcgtaccggcctgaccttcgaccagtcgcctaccaacaacaaagaccgttcgccacgtatcccaaccggcgaccggactatcttcagtctcggccttggttacgatgtaatgccgaacatgaccgttgatctggcttactcctacctcaaggaagaaccagtcaaggtcgctcgcgccaacgcattgggccagtcctacaatgctaagtacgagaacagcgccaatggttttggcctgggcgtaacgtacaagttctgatctgacaccgtatgaaaaagccccgctctcctgcaaaggaagcggggctttttaatggctggccctcaaggtttggaggcgatcgcctgctccaccgccttgatcagatccggactgtccggcttggtcaaactggagaaattggcaatcaccttgccctgccgatccaccacgtacttgtagaaattccacttcggcggtgtgtcggtctgctgtgccagtaccttgaacaggtgcaccgcgtccggccccttgaccttctgcggttcggtcatggtgaaggtcacgccgtaattcacgtagcagaccttggcagtctcttcgccggtcttggcttcctgcttgaagtcatcggacggcacgccgatcacttccaacccttggcccttgtaacgttgatacaaggcttcaaggcctttgaactgtggggcgaacccgcagaagctggcggtgttgacgatgaccaggggcttgccggcaaagcgctggcacaggtcgatggattccttggcgcgcagcttgggcaactggccttccagcagcggcgggcaactggcggccagggcggcactgccaatggccatcaggacgggtacagcgagccaacgcatctgcatgtcgtgtgtccttgaaagtaatcaaaccaccaacttaacagatcgacatacccagttgcatcaacgccagcccgccatgctgccagccccaccaggccagcagcaccaggatcagccccgcaacgaggatcacaccgcgtaacgctacattcatgccgcctccatctgcgcctgcaagcgcgccaccggccgctcacgtaccggccagttaagggcggcggcgagcaggctcaacagaatcgccacctgccagatcaaatcgtagttaccggttcgatcatagaccaccccgcccagccagccacccaggaacgaacccaactggtggaacaggaacacgatgccaccgagcatggagaggtttcgcacaccaaacagtgtcgctacggtaccgttggtcagcggcaccgtggatagccacaggaagcccatcgccatgccaaacaggtaggccgtgatctcggtgaccggtgcccacagaaacagcacgatcaccaccgcacgcagcaggtacaagcccgtcagcaggcgcggtttggacatgcgcccgccgagccagccggcggtgtaggtcccgaagatattgaacagcccaatcagtgccagcaccgtggtgccgacggtggccggcaagtgttggtccaccaggtaggccggcaggtgcacgccgataaacaccacttggaaaccgcagacaaaaaagccgaacgccagcagccagaagccggaatgggagcaggcttccttcaaggcttcccgcagggtttgctgacccgccaccgccggtaatggccgatccttgagcatggcgaccagcggcagaatcaacgccaccatcaggccgagcgccagcagggccgcggaccagcccagccagctgatcaaacccagcgtgcccggcaccatcgcaaactggccgaacgaaccggcagcactcgcgatgcccatcgccatgctgcgtttttccggcgccaccgcgcgacccaccacaccgagaatgaccgagaacgaagtgccggacaggccgataccaatcagcaagcccgcactgagggacaacgaccacgccgaatcggacatgcccatcaacactaggccaacggcgtaaagaacaccgccgacaaacaccgctttggtggcaccaaaacggtcggccagcgcaccggtgaacggctgcgccaggccccagatcaggttctgcagggcaatggcaaaagcaaaggtctcacggccccagccaaattcactgctcatcggcgccaggaacaggccgaaaccgtgacgcacgcccaacgacaacgccaggatcagcgcactccccacaagaatccagccactggtgcgccacatcgaggtcatttcttattctccgctcgcgggtatatacccgcttatattcgaaccaacccgcgctcaggcgagttcgtccagcaaggccaacaaggtttcgcgtttttccgcgcccagttgatcgatcaatttctgttgcgctgcctcccaagcgggtaatgcggcggcaagtcgcgcctcaccctctttggtcaacatcaccaggcgattgcgcaggtcgtcgccttccaccagttgcaccaggccctcgccttccagcacccgcaggttgcgccccagggtgctgcgatccaggcccatggcttccgccaggctggaaatgctcggctggtcgagccgttgcaggttgcacaacaaagaatactgggcgacgttgatcccgaagccgtcgagagcgccgtcgtaatgcctgctgacgccacgggcggcacgtcgcaggttggtacacaaacattgggaggcaagcatggaacgtgtatatacccgcgattaaggaaatgcaagaaagtgttacagcgccaggccgaccaacaccacgacttccagcagttccagcaaggcccctgcggtgtcgccggtggtgccaccgaggcgattgaccatcagttggcgcacacccacaaaggcgatcgccgcgagcaataccgcaaccccgccgctgaagccaccgatcaggatgcaggcaagaccactgaggatcagtacctgttggccgacgatcctcggtaaatgatccgacaatgcctggcccaatccaccggcacgcacgtagcgcgtggtcagaaacaacgccagcatcgatgcccggccgatcagcggggccaggatcagcgcggcgccgttgtgttgttcgatcaacgccaccaacgcggtgaacttgagcagcagcaccaagccaagcgtcaccaccgcaatcggcccgctgcgcgggtccttcatgatggtgagcgtgcgctcgcgatcaccgaagccgcccagccaggcatcggcgctgtccgccaggccgtccaggtgcaggccgccactgagcaatacccaggccgtcagcaacagtgcggcgtgcagcagcaatggcgcgcccatcaataggctgttcagcgcccacaacagcacgccgaacaacaggcccacgaccggataaaacagcagcgaacgccccagctcctgaggctgcggcatgccgggcaggcgaatcggcaggctgctgagaaattgcagggcgatccagaagggcagcatgtctacgccccttccttcagcgtgccgtcagctgcaacttggaggctgaacagcccaccatgaccaacttcgacattcaataactgctcccggggcaaaccacgcgcctgcgccagtaacaggcgcatcacgccgccgtgactgatcaacaacacccgctcaccggcatacgcctgatacaggcgtgagacagcccccataacccgctcggaaaaggcgctgaccggctccccgtccggcggggtaaagctataaggatcggcccagaacaaccccagcccttcggcgtcggtctccatcaaggccgctgcactctgcccttcccaggcaccgaagtgcagttcttgcaggtccttctccagcgtcaccggcagctcgagccgggcgcctaattcttcggcaaatcgcgcgcagcgtcgcaacggcgaactgatcaagcggtcccacggcccctgccccaccacggcctcgcgcatctgcgcccagccgttggcggtgagtgcgtcgtccaggctgccacgcaggccgccgcccagctcggtttcgccatggcgcaacaggtcgaggtgcaaggtcatgccgggcggtctgccacggcggcttcggcaaaggtcgccatctgcccgtgcaatgcacaggccaggcgcaacaacggaaccgccaacgcagcaccactgccttcgcccaggcgcaggcccagttccagcagcggctgcgcgtcgaggtgttgcagcacatgacgatggccaggctcggcgccgcgatgaccgaacaccagccactcacggcacgcagggttcaggcgcgtggcgaccagcgcagcgacggtgcagatgaacccatccaccagcaccacaatgccctcctgagcacaggcgaggtatgcccccaccagcgcagcaatctcgaagccgccgagattgaacagggtctgcaaggcatcaccgcgctgagcggcatgcaccgccagcgcgcgttcgatcacggccactttgtggcttacgccctgggcattcaagccggtgcccggccccgtcaggtcactgacctggcagtcgagcaaggcacacgccagcgcactggcggcggtggtgttgccgatgcccatctcgccgccgataaacagctgtgcaccacctgccaacgcacgccgcgcactgtcacgaccgacttgcagggcgagttgcccctgtgcctgggtcatggccgggccgttgacgaagttggcggtgcccgcgccgatattcaggtgccgcacaccgggaaggtccagggacggggtcaccgtgccgaggtcgaccacttccaactgggcgtccaactgccgcgccaatacgctgatggccgcgccaccgctgacgaagttgtgcagcatctgcccggtgacttcctggggaaacgccgacacgccttcggcaactacgccatggtcaccggcgaagatggcgatccacagcgagtccaccgacggtttgacctggccctgcaagccggccatttgcaccgccagcgcttccaactggccgagggagccggccggtttggtcagttgctgctggcgtgccagggcatgttcgtacgcttgagtgtcaatcgccttgcacgggttgagccaccaggtgtcagtcataacgcagtacctttcaaagtcaggggcaggccggcgacggtcaggacaacacgctgacaccgctcggccaaggcttgatgcagccaaccggcttcatccacatagcggcgagtcaattcgcccagcggcacgacacccagaccggtctcgttgctgacaaaaatgatttcacccggcagcgcggccagggtttccagcagttgatcgcgctcggcggccagacgatccgagtcctcaagcatcagcagattggtgagccacaaggtcaggcaatccaccagcagacagcgctcggttgctgcgttttcacgcagtacacgcgccagttcgacgggttcttcgatcagcccccaatggttggggcgacgctggcgatgcagggcgacgcgctcgttcatctcgccatccaaaggttggctggtggcgatgtacgtgacgggcaaaccgctgtcagttgctagcttttcggcgaggcggcttttgccggaacgggcgccaccgaggatcagttggagcatgacataacacctcgtttggccagtgggaccctcgaagctggcacggttccctgtgggagggagcttgctcccgatggcgtggcgccagtcagcccattggctactgacacaccgccatcgggggcaagccccctcccacctttgggttgcagtgcagcagttgaatactcagcgcattcgctcactgtcaaatcccacatagtttgcgtaacaactcagtatccaagtggttctccaccaagtccgccaggcgctcgatatcgcgctcgcgcagggcgtggtaatccacttcctgcacgtcctgcaaaccggcccagcgcaacagggcgctgcacgcggccgggctttcaaacaagccatgcaagtaggtgccaagaatttgcccatcggcactttgtgcgccatcgctgcggccatcatccagcagcacggcggcattcgacaaagcatcgccgcaggtcacgcccgcatggatctcataaccgctgacctcggcattctccaacaacaaacgcccgcgcacattgcgcaattgcttctcttcttccagcgtggtgctgaacgccagcagccccaggccatcactggaaccggcaagcccttccaggcccaacgggtcgtgcacttgctcgccgagcatctgcaagccgccacaaatgccgagcaccttgccgccatagcgcaagtgacgcgccacggcggtgtcccaaccgttggcacgcagataggccaggtcgctgcgcacacttttcgagccgggcaggatgatcaggtcggcggccgggatcgactggcccggaccaatgaattgcaaatccacctgggggtgcaggcgcagcgggtcgaaatccgtgtggttgctgatgcgcggcaacaccggcaccaccaccttgagcacctgggccgccttgtcgatctggcgttggtcgataccgtcctccgcttcgaggtgcaggtccatcacgtagggcaacacgcccaccaccggtttgccggtgcgcgcttccagccagtccaggcccggctgcaacagcgcgatgtcaccgcgaaaacggttgatgataaagcccttgacccgcgcctgttccgtgggtgacagcagctccagggtgccaaccagatgggcgaataccccaccgcgattgatatcggcgatcagcaacaccgggcaatccaccgcctcggcgaagcccatattggcgatgtcattggcacgcaggttgatttccgccggggagccagcgccttccaccatgaccacgggatagccctggctcaaccgcgcatgggaggccagcaccgcctgcatcgcgatggctttgtagtcgtgataggccacggcgttcatggtggtcacggcacggccgtggatgatcacttgggagccggtgtcgctgttgggcttgagcagcaccgggttcatgtcggtatggggtgccaggttggcggcctgggcctgtactgcctgggcgcggccgatctcgccaccttcggcggtcacggcgctgttgagcgccatgttctgcggtttgaacggcaccacggccacgccctggcgtaccagccagcggcacaatgcggtcaccagcgtgctcttgccggcatcggaggtggtgccctgcaccatcagcgtactcatgttgcgtccttataggcggccagggcttcgtcgaggcgctgccagtcggcctcggtgtcgggcaggccgaaacgcaggctgctgtcgtggacgaacaggcgcagcagaatgccgcgctgggccatgaattcgtgcaaacgctcagcgtggggcgtgatcagccattggaacagcgcgcagccaccgtggggtggaaaaccgtggcgctccagcaacgcgaacaaacgctggcccgcctcgacacaacgcgtgcgttgcagcgcatgcccggccgtgtcgcgcaggcacacttggcccagcacccgcgtcggtccgctgaccgcccaggggccgacctgctcggcgagcaacttgagcaacttgcgctcggccaacgcaaaacccaatcgcacgccggccaggccgaagaatttgccgaacgagcgcagcacgatcaaaccgacctgatgcgcctggctggccaggctcagttgcggggtcacgtccatgaaggcttcgtccaccaccaaccagccgccgcgctgggccagccgcgagtgccaatccagcaagcgttgcgggctcaggctcaggccggtcggattattggggttgaccaccactagtacgtcgaggccatccaggaagaagtcgacttcctgctcctgcacttcgcgcaccacgtaaccggcacggcgccaggcttcggcgtgttcggcatagcacggcgacagcacgccgaccttgcccgcgcgacgcagccgcggcagcaactggatcgccgcctgggaacccggcaccggcaacagatgcgcagcgccatagtattcgctggcggcctgctccaggccgtcgtcggtttccggcaggcgcgcccaggcgcgcaacgggatctcggggatcggccaaggccagggcgcgaggccgctggacaggtcgagccagtcggcttcggctatcccgtattgaatcgcggccttgcgcaaccggccaccgtgctcaagcatagaattgcgcccccgcgcataggatcagcagccacaaccatacgccgcgctgcaccagttgccagccccggtcgatggaatcggcatccgccgccgggccttcgcccagttgcggacgatggtgcacttcaccgtgatagatcgcggcaccgcccaactccacgcccagggcgccggcacccgcggccatgaccggaccggcgttggggctgtcccaggccgggccttggatccgccagcatttaagcgccaggcgcgtcttgcccagcagcgcgtaggtcaacgccaccaggcgtgcgggaatgtagttcagcacgtcgtcgatttttgccgccgcccaaccgaagcgctcaaagcgctcgttgcgataaccccacatggcgtcgagggtgttgctcaggcggtaaagcaccacgcccggcacaccggccaccacaaaccagaaaatcgcagcgaacacagcatcgctgccgttctccagcaccgattcggtagcggcacgggcaacttcggtgcggtccagctcgctggtctggcggctgaccaggtagctcacgcggttgcgcgcctcctccaggtcatcactgcgcagcgcctgggccaccggaatcacatgctcgccgaggctgcgcatgccgagggcgcagtacaacgccaggatctccagcacccagccgatgtacggcgcccacgacaaggccgtggccagcagcgtcagcggcaccacggcgataaaccacgcggtcacgccatggctgcgccagccacggccaccggtattgaaacgctgctcgatgcgcccggcgaaattgccgaacgccaccagcggatgccagcgcctgggttcgcccagcagcgcatccagcgcgactgcagcgacacacagcaaggccacactcattgactcactccccacgcattctcatacaacatgtcactcaacggccgtggttcggtccagccttcgagctgcaacatcggtgccgggtagaactcggccactggtcccaggcacagcacggccaggggtttcgcgccgggcggcaaacccagcagatcggccagcgcctgcggttcgaacaacgagacccagcccatgcccaggccttcgacccgcgccgccagccacaaattctggatagcacaggacaatgacgccatgtccatttccggcagggtgcgacgcccgaagatgtgccgctcgcgatcgtccatcaacgccgccaccagcacttcggcgcagtcgtgaatgccttcgaccttgagcttcatgaactcatcggagcgctcgcccagggcttcggcagtgcgtacgcgttcttcttccaccaattgttgaatctgcccacgcagttggcggtcgctgatgcggacaaagcgccagggctgcatcaggccgacgctgggcgcctggtgtgcggcctggagcaggcggtggagcaattgcggggcgaccgtaccgccgctgaagtggcgcatgtcgcggcgttcggcgatggcacggtagacagcctggcggtcggcctcggggaaggcgttgtcagtcatagtgctgaatcgggcgcaaacaatgcggccaccgcctggggattggatgggaaatagaaatgtacgtaggacgccgtcatccgcccctgccggtataccgcctcggcaccgcgcccgccgttggggctcaggccacgggcgatcggctgccattcagtggtggtcagggaatggtgataggtatggccacgcagggtgccttccggcaattcgacgctttgcagggccagggccgccagtttcttttgcatcaccgcgtcgccctggagcaggccaagcagttcggcgcggacgccgtcgacatcggtcagcgagtccagcaggtagagcatgccgccgcattcggcaagcaagggtttgccggccgcgtggtgagcgcgaatggcgtcgagcatcggggtattttccgacagcgcctggtggtgcaattccgggtagccgccgggcaggtagaggctgtcggcgtcgggcaactggctatcgtgaatcggcgagaagaacgccaactcagcgcccatcgcgcgcagcaggtcgagacttgcaccgtaggtaaaagcgaaggcctcatcgcgggccacggcaatgcgcacgccgttgagcaagggttcggcctcgataacttgcggcgcagcaaatgtcaccggtggcggcaaggcgacttcgcaactgctgcccagggcttgggcggcagcgtccaggcgcacatccaggtcattcagttcgctggcctgcaccaggccgaggtggcgactgggcagttcgataccggtctcgcgtgacaacgcgccataccagcgcaggccctcggtgaggctgccttcgagcagttgcgcatgacgcagggtgccgacccggttggccagtacgccagcgaatggcagatccggctgatagcgcgccaggcccaatgccaacgcaccgaaggtctgcgccatggccgtgccgtcgatcacccccagcaccggcacgccgaagtgccgcgccagatcggcgctggacggtgtgccgtcgaacaggcccatcacgccttcgatcaggatcaggtctgcctcccccgccgcttcccagagcaaacggcgactttcctgcttgcccaccatccacatatccaactgatacaccggcgcaccgctggcgcgctcgtgaatcattgggtcgaggaagtccgggccgcatttgaacacgcgcaccttgcgccccaggttgcgatgcaaacgggcaagcgcggcggtgacggtggttttgccctggccggacgccggagcggcgatcaatacggcagggcaatgacggggctgattcaaagttcgacgcccttctgtgccttgataccggcctggaacgcgtgcttgagcatgcccatctcggtgacggtgtcgcccatttcgatcaactcgggcttggcgccacggccggtgaccaccacgtgttgcatcgggggacgggcttgcaggtcgctgaggacctggtccaggtcaaggtagccgtgcttgagcgcgatgttcagctcgtccagcaccaccaggccgatggaggggtcttgcagcaattcgcgggagaccgcccaggcggcttcggcggcggcgatgtcgcgctggcggtcctgggtttcccaggtgaaaccttcgcccatcacatggaaacgcacttgctcggggaagcggcggaagaacagttcttcaccggtgctgttacgccccttgatgaactgcaccacaccacactgcatgccatggcccatggctcgggccaacatgccgaacgcggagctactcttgcctttgccattgccggtcagcaccagcagcaggccgcattcgttgggggagttggcgatgcgctcgtcgatcacggcttttttgcgcagcatgcgcgccaggtggcgttcgtcgcggtcgggggaatcggtcatggcagctctccgttggggctggacaaaaacggcgggcaggaaaaaaagaacaacagacagccaagcatcgcccaccgtgatgctgttggatgttgcaggccggtctccgggctcatgagtggtgtgcgggttgaaggcaggccaacgctgcgccttcccatatcgcaggcgatacagtggcaaaaagcagcgtcttgactcatttaccgttgcgggggcagcgccggaatcgaggcggcactgtgtagaagtgcgctcactcaccggcttccctgtttcactccgtcgacccgtgggtcacagagcacctggaacaagcggcgaagggtagtaggttgggggtggagcgtcaattaaagcaactgcctcacctgtacttgaagctgccacaaaacaactgtgggagggggcttgcccccgatggcggtggatcagcccattgatcgttagctgacacactgctatcgggggcaagctccctcccacattttgattcgagtctggcgctaaggattgcgtgccaggttgcccggcaacacgcgcttggcgctcaggtaggcattctgccaataggccttggacagtgtatccagcttcaccgtaccgccggtttgtggcgcatgcacaaagcgcccttcacccacgtagatcccggcgtggctgacctgggaaccgccaccggtggcgaagaacagcaggtcaccggtctgcaggttctgctcgctgacgtcctgcgcgcgcattacgatcagctcgcgggtggtacgcggcagggaaatcccggcggcatcgcggaagacaaacccgatcaggccactgcaatcaaacccggagtccggcgtattgccaccccaacgataaggcgtgccgaccaggcccagcgcccggaagagtacgtcttcggccgcaggcgagaaattctgggtggaatagttgaacaccggcttgggcttcaccgctacgggagcgggcggcggtgtgcggcttgcgcaggcgctgaggagcgcggcgcagacaatgagaataaggcgggccgaggtcgacatgtgcagaacaatcctggtctggatgcggctttcgctgccgaacgctgaaaaccagaacgcgcaagcaaagctcgcgcgaacggattacaacaatatccagggattctagcgcttacacgtcaaacttcaagtatcactttaagtttacttgctagcggtaaccgtcgtcggggccatggcgagtgcacgcttggcttcgatgaaggttttgctccagtagctgtcacccaggttatcgacccggacaccaccactgcggcggctgctggagtggataaactggttatcgcccaagtagataccggcgtggctgacacgaccacggcctgccgtactgaagaaaagcagatcaccgggcttgaggttgttgcgtgcgaccaacggtgcattcacgttgatcatttcacgggtggagcgcggcaggttcatgccggcttcttcgcgaaacagatagccgatgaaaccgctgcagtcgaaaccggcttcagaggtaccaccgaaacggtaacgggtaccgatcagggacatgccgcgttcgaggatgctgtcggccaggactggaagctggtaaggcttgttgccggcgaagtcggccagttccttttccgttgcaacttcttcctcataaacagaggcagattgagcagcaacgaattttgcctgattttgaacctgtggtttttgctgatctgccacctgctgagggtgggaggcgcaaccaaacaacagggtaacgagtgcgaggggcacgaggggtgcgaagcgatttagcatgggcacgaccgtggctgatatgtaaagaagtcgagactatgccttctatcacatcgatttgcaaattcaatcgtggtctatgtgacttcttgtttggactatgacatctaagcccttaacaccctgtacctgccttttgcgtggccaaaccggctcaaacgcaggttttctggcgcctgtaatttgccgaaagccgcgaaaacagcgggctagctaccagccgagggtttctttgaggaaggggatggtcagcttgcgctgggcctgcaaggaggcctgatcgagctgttcgagcagatcgaacaatgcgctcatgctgcgggtgcctcgagtaaggataaagtgcccgacctcgtcggtgaggtgcaggccgcgacgggatgcgcgcagttgcagggcacgcaatttgtcttcgtcggacagcgggcgcatctggaagatcagcgccagggtcatgcgcgacttgaggtcggccagcttgatcggcaactcgcggggcgaagtcgacgcggcaatcaacaggcgccgaccgctgtcacgcaagcggttgaacaggtgaaacagcgcttcttcccattccgctttgccggcgatcgcttgcagatcgtccaggcacaccagttcgtattgctcaagatggtcgaagatgccgataccgcggtccatcaactcggccaacggcaggtacaccgccggttcgcccatctgctcgaaccgcaggcacgcggcctgcaacaggtgggtacgccctacgccgtgcttgccccacaggtagatcaggctttcggtccacccggcgtcggcttcgcagagccgctcgacatagccgagtgcagcggcattggcgcctgggtagtagttgatgaaggtggcgtcgtcacgcagacgcacacccaagggcagctgaatcggtttcatgctgactgaacggctccaaacgaaccgttagtggcctctgtgtaaagtttgcaaagtttatacccgtgacgccgggcgcacaatgcaacagaccccaagcaaaatcaaaggtttgcgttaacttgttggatttgtgcagattgtttgacggaccgctcccagaaaagacaaacccggcgttggccgggtttgtgaagaaagggttacaagtcgggatcttcaacccccgtatacgcatccgaatccttgtacagatcgtgcacatggcgcaccagcaccatgatcaccgccgccaccggcaatgccagcaggataccggtgaagccgaacagctcaccgcccgccaggatcgcaaagatcaccgccaccggatgcaggccaatccgatccccgaccagcaacggcgtcagcaccatgccttcaagggcctggccgaccatgaatacggccacgatccccagcatcgggtacaggtcgccgccaaactggaacaagcccgcgaccagcgccgcgccgatcccaatcacaaagcccatataaggtacgatcgcggccaggccggcgatcaggccgatcaacaggcccagttccaggccgatagccatcaagccggccgcgtagatgatccccagggccagcatcaccagcaactgcccgcgcacgaaggcgccgagcacctcatggcattcctcagccagtgaaacaatgcgttcctcacggttgcgcggcagcaggctgcggatcttggccatcatgatgtcccagtcgcgcagcaagtagaacgccaccaccgggatcagcacgaggttggtcagccagccgatcagcgccaggctggacgcagtcgcctggctgaggatgaccccgacgatgtcggtggtctggcccatatgttcgctgatggccgccttgaccttgtcgaacttccagaagccatccgccagccccagcttggcctgggcccatggcatcgccgtgtgctgcagccaatcgagcatctgcggcgccagctcatacaagcggaacaactgcttggccagcatcggcaccaacaccagcaccaacgccgtgatgatcaaggtaaacagggcgaacaccgccaccacgccccaggtccgcgacaacccggccttctccagacgatccaccaccggatcgaacaggtaagccagcagcaacgcgaccaggaacggcgtcaggatcgaatgcagcaggaacacaaaaacgcacagcaggacaaacccgccaagccacacccaacgacgcgtatccgccataaaccactccatctatataaagaagaaaactactaccaacgaaaacgcagttgcgcctgaggttctggggcagcagcaggctgcgcaccctccgccacgggttgctggaccggtgcttcacccgcaggaatttcctgcaacctggccaggctcaactgagtacgcaactgatcggcactgccattgacgcggtacacgatgcgattgccatccactaactgcggctgaccgccgaaaggctccagcagatgacccagcgcggcataacgctcaagggtcatgccctgcacttccagcaattgttcggtgctcacgccgggcttgaccgcaaagcgcggcgccagcttctggctgaccgccagcatcaccgcatcggccacggcgccggtgtcgggcccttgcgccgtgccttgctcacttttgtcgcccagccacagacgccatttggcctgccactggctgccttcctgacgcgcatgcaccgccagcaaggcgtcggcgccgtaacgctcggaggcagcgcgcagcggtgtggcgtcggcactttccagattcggtgcggtggcgaccacctgttcatccaggtcacccagcggcaggcgcaacggcaggcctctgtgttgcgcggcacggcgcagcgcctgggcaacggtctggccatcgcccaccaggctgctgccttcggtggagtcgttcagccaccagccaaggatcgacggccgattgctgccccagatcgacaggcccgcttcccgcagcacgcgatcggtgctcaccgggtcgaaatccacttgcaggctttccggcgggccagcgtcgtagccgtactggctgatgatttgttgcgggtccttgcgaacggccgccaggcccgggccatcggcggccttggcgtcgccggtcaagcggatcaccagggtctgcacggcgcgctgggtcgcctggtcgcgctcttgcggcgactgactgctgacgggctcgagtacttgataaaggccattgagggtttcggcatgactcgccaggctgaccaacgacaaacagcctacaaagaagaacttgaacaaacgcatgaaagattcccgaacgacaaatttagcggctggaacagaccgcgtgaactcggcttggcaaggctgtgaccacagcgaccggtaaaacattcacagggtcctggcagtttttgtactgtcataacgatagcggtttaaaggctataccttaatacgcgccatggcaggggccatcagcattttttaaccggctttttttacctatatggccctgcccgtcggcccgaggatggccgctgcccctcaagcctgataaaatcgcgcgccttcgcagaccgtcaccggctgggccttttaccaaaagcgcctgcccgctcggtcgttacccctgaatcccccctaaaggcctggatcatgagcaagcaaccctccctgagctacaaggacgccggtgtagacatcgacgccggtgaagcattggtcgaacgcatcaagagcgtcgccaagcgcactgcgcgccccgaagtcatgggcggcctgggcggttttggcgccctctgcgaaatcccggccggctacaagcagcctgtcctggtatccggcaccgacggcgtgggcaccaagctgcgcctggcactgaacctgaacaaacacgacaccatcggcatcgacctggttgccatgtgcgtcaacgacctggtggtgtgcggcgccgagccgttgttcttcctcgactactacgccaccggcaagctgaacgtggacaccgcggcacaagtggtcaccggtatcggtgccggttgcgaactgtcgggttgctccctggtcggcggtgaaaccgctgaaatgccaggcatgtacgaaggcgaagactacgacctggccggcttctgcgtcggcgtcgtggaaaaagccgagatcatcgacggctccaaagttgctgccggtgacgccctgctggccctgccgtcctccggcccgcactccaacggttactcgctgatccgcaagatcatcgaagtgtccggtgccgagatcgagaacacccagctcgacggcaagccgctgactgatttgctgatggccccgacccgcatctacgtcaagccactgctcaagctgatcaaggacaccggcgcagtcaaggccatggcccacatcactggcggcggcctgctggacaatatcccgcgcgttctgccaaaaggcgcccaggccatcgttgacgtcgccagctggcagcgtcctgcggtattcgactggttgcaagagaaaggcaacgtcgacgaaaccgaaatgcaccgcgtgttgaactgcggcgtcggcatggtcatctgcgtggctcaggagcacgttgaaaccgcgctgaacgtactgcgcgaagccggcgagcagccttgggtcatcggccagatcgccaccgctgccgaaggcgcggctcaggttgagctgaagaacctcaaggctcattaatgtctcagacctgtgatgtcgtggtgctgctctccggcaccggcagtaacttgcaggccctgatcgacagcacgcgcaccggcgacaacccggtgcgcattgctgcggtgatctccaaccgcagcgacgcctacggcctgcaacgcgccagggacgcgggtatcgacacccgctccctggatcacaaggcgttcgagggccgtgaggccttcgaccgcgccttgatcgaactgatcgacgccttcaaccccaagctcgtggtactcgccggcttcatgcgcatcctcagcgctgacttcgtgcggcattacgccgggcgcctgttgaatatccacccttccctgctgcccaagtacaaaggcatgcacacgcaccagcgtgcgctcgaggccggcgaccgcgagcatggctgcagcgtgcactttgtcaccgaggaactcgatggcgggcctctggtcgtacaggcagtggttccggtagagtctgacgactcggcgcagacgcttgcgcaacgggttcacacccaggaacacaggatttacccgctggccgttcgctggtttgccgaggggcggttgattcttggtgaccagggtgcattattggacggtcagttactcgcggccagcggccacttgattcgaacctaggagattttatgcgtcgcgccttgctcttcgcttttgcgctgttcgccttgccagccgtgcaagcagcagaccttcaccccttctccgtcagctacaccgccgactggaaacagttgcccatgagtggttcggccgaacgcagcctggccaagaacggcgacggctcctggaccttgaatttcaaggcttccatgatgatcgccagcctcaccgaaaccagcgtgatcctgtttgacaaggacaccctgcaaccgaagagctacaccttcgaacgcggtggcctgggcaaggcgaagaagatcaatctggacttcgaccagaccgccaagaaagtcaccgggtttgaaaacaaagacccggtcaacgtgcccctgcaaagcggcatgctcgacaagtcgacctaccagttggccctgcagcgcgacgtggctgccggcaagaagagcatgagctacaacgtggtcgaaggcaccgacgtcgacacctacgacttccgcgtgatcggcccggaaaaggtccagaccaaggtcggctccatcgacgcgatcaaggtcgagcgcgtgcgtgacccgacgcagagcaagcgcatcacccagatgtggtttgccaaggaccagggcggcattctggttgccctgcgccaggtagaaaccgacggcaaggaatacaacatcatgctgcaggacggcaccgttgacggtaaggctgtcaaaggtagctgatcggtagctggaacagagagcctcgcgaatgcggggctttttttcgcctgtcgattgggtttcgcctgacacgaacatgaaacttttgtcataaaactcagggccctgcggcgcaatgtcgcggttttcgcgggctgcagcactgttgcatttaccgcaatgaattgttgcgcgaaaagtcggtttacttagcaagctaacaaatcatataacaaaggcctgcgacgacttgccgcagatccaccagagattggagcaagcagatgactgtaaaagtaactgaacgcgacgacgaacatatgtcccacgaagcactgggccatgggattcacatctgggatgtacaccagcaagacctgttggtcggcatgtttcacaacgagagcgacgctcataattataaaaacgagctcgaagcccttgagatgagacgccagtcagaaagctcctgaagataccttgtagtgagcgggcttgccccgcactgggtggcgaagccgccccactaaaaacgccgcattctttctgggagaatgcggcgtttggttttcagggtcggccctttcaaggtctttaggtagaacaggcgatgagtaccctgtggcaagcccgctcgccacaacaagcctgctcactacaattaaggctgcagccttaccacatcaggtcatccgggatctggtaggcggcgtacggatcatcctcatccggcacctggctttccgtcaggatattgagctggacgatacgctccggtgcgcgctcctggattttcagcgccgcttcacgcgggatcacctcataaccgccgccgtggtgcacgatcgccagggagccgttgctcagcttgttgcgcatcagcgtgttgaccgacaggcgcttgaccttcttgtcgtccacgaagttgtaatagtcctcggtggtcagcttgggcaggcgcgaggtctcgatcagttgcttgacctgggccgtgcgggccttggcctcggctttttcctgctgctggcggttcagttcctggtcgcgcttgaccttctcggcctgcgcttcagccgccaggcgggcctgggtgtcgtctgcctcgatctggcctttatgaaccaggcgctgctgtttctgtttctctttgccgacctgcttggcctgcttttggttgaccagacctgctttgagcaactggtcgcgaagggaaaggctcatggtgcttactcacttaggcaactgctcaaccgcagctggacacattcttttcctgacgtttggcttcgccccacagggcgtccatcgtttcgagggtgcaatcttctatggattggtgcgtatcgcgcaatgcctgttcgataaatcggaagcgtcgctcgaacttggcattggcgccacgcagcgcggtttccgggtcgaccttgaggtgacgggccaggttgaccgccgcgaacagcagatcaccgacctcatcggcaatcgccgcagaatcgttgtcggccatggcttcgagcacttcatcgagctcttcgcgcacgttatccaccaccggcagggccgacggccaatcgaagccaacctggctggcgcgcttctgcaatttggcggcgcgggacagggacggcagcgccgtgggcacgtcatccagcagggagagttgctccggcgcgtcggacttttccgcacgctcctcagccttgatctgctcccagcgctctttgacctgttcttcactcagctgtgggatatccagcggcgcatacaggtcgccggtgggaaacacgtggggatgacgacggatcagcttgcgcgtgatgctgtcgatcaccccggcgaattcgaagcgcccttcttctcgcgccaactggctgtaatacaccacctggaacaacaggtcgcccagctcaccctgcaggtgatcgaagtcgccgcgctcgatggcatcggcgacttcgtaggcctcttccaacgtgtgcgggacgatggtggcgtaggtttgcttgatgtcccacgggcacccgtattgcgggtgccgcaggcggttcatcaggtgcagcaggtcttcgagcgaatacatcatggggtacggttacgccgcgtctcgatgatattcggcaactgggaaatccgccccagcaaccgccccagtgcgtccaaccccggaatctcgatggtcagggacatcagcgcggtgttgtcctctttgttcgagcgggtattgaccgccagcacgttgatccgctcattgagcagcacctgcgacacgtcacgcagcaacccggaacggtcgtaggcacggatgacgatgtccaccgggtaagtgagcaccggcaccggcccccaactgacctggatgatccgctccggctcacgcccgcccagttgcagcaccgaggcgcaatcctggcggtgaatgctcacgccgcggccctgggtgatatagccgacgatggcgtcccccggcagcggctggcagcagccggcaatttgggtcatcaggttgcccacgccctggatctggatatcgccacgcttgccgggcttgtagccggtggccttgcgcgggatcagttccagctgttcgctgccgcgttccggctcgaccagttgctgggccaggttgaccagttgggccaggcgcaaatcgccggcaccgagggcggcgaacatgtcttcggcaatcttcatgttggccttttcggccagcttgtcgaagtccacctggggtaggcccaggcgcgccaattcgcgctcgagcaaggttttaccggcagcgacgttctggtcgcgcgcctgcaatttgaaccagtggacgatcttcgcccgcgcccgcgacgtggtgatgtagcccaggttcgggttcagccagtcgcggctcggcgtgccgtgcttgctggtgatgatctcgacctgctcaccggtctgcaggctgtagttgagcggcacgatgcggccgttgatcttggcgccccggcagttgtggccgatctcggtgtgcacgcggtaggcgaagtccagcggcgtggcgcccttgggcaagtcgatggcatggccgtccggggtgaagatatagacccggtccggctcgatatccacgcgcagctgttcggccaggccgccgatgtcgccgagttcttcgtgccattccagtacttggcgcagccaggagattttctcttcgtactggttggaccccgcctttacgtcggtgcccttgtagcgccagtgcgcacatacacccagctcggcctcttcgtgcatggcgtgggtgcggatctgcacttccagcaccttgccctcggggccgatcaccgccgtgtgcaacgagcgatagccgttttccttggggttggcgatgtagtcgtcgaactccttggggatgtgccgccacagggtgtggacgatgcccagcgcggtgtagcagtcgcgcatttccggcaccagcacgcgcaccgcacgcacgtcgtagatctggctgaaggccaggcccttgcgctgcattttgcgccagatggaatagatgtgtttggcgcggccgctgatgtcggcttcgacgccggtggcctgcaattcggagcgcagctggttcatcacgtcggcgataaagcgctcgcggtcgagccgccgctcatgcagcaacgtggcgatctgtttgtattgatcgggttcgaggtagcggaaggacaagtcttccagctcccacttgatatggccgatgcccaggcggtgcgccagcggcgcatagatgtcgaagacctcgcgggcgacgcggttgcgcttctcgtcgtcggcggtcttcaccgcacggatcgcgcaagtacgctcggccagcttgatcagggcgacgcgcacgtcatcgaccatcgccaccagcatcttgcgcaggttctcgacctggccctgggtgcccagcaccatggactggcgcgggctgaggctggcactgatcgcggccatgcgcagcacgccgtcgatcagcttggccaccacggtgccgaaacgctggctgacggtgggcaacgggatatgcccttcacgcacgccgcgatagagcacggcggcgatcagcgaatcctggtccagcttgagatcggcgaggatctcggcgatttccaacccggtgcgaaagctggaagtgccttcggcccacaggttcttggccgcattgtcttgctgctcggactcacgagcgaactcgcaggcggctttcaaggcttcacggtccagtgccgggtcgacactgatggcatggtccagccatgcctcgagattgatactgccgtcggtgttgatcggctggtgtgctctcacctgtaccatcttgcttaccttccctacgacgcaccttcgatgcgccaaaatcatcgccgacgtttactgcgaactccctggcagatcacaggccctggagaacgcaggccagtcggattaaacgggcatcctagcccgcttcaaataacgccatggcctcgacatgcgcggtttgcggaaacatgtcgaggatcccggcacgttttagccggtagccttgcttgaccaactcaaccgtgtcccgcgccagcgtggccgggttgcaggacacatacaccagacgcttggcgcccaaggtcgcaagcttgcgcacaacctctagggcaccgtcacggggtgggtccaagagtaccgcagaaaagccctgtttggcccattctgcgtcaatcaaaggctgggacaaatcggcctgaaaaaactgcgcattatgcaaatcgttgctgacggcattcacggccgcccggtccaccatggtctgcacaccttccaccgccaccacttcacgcacctggcgcgccagtggcagggcgaaattgcccaggccgcaaaacaggtccagcacccgttcgtcgggttgtggcgccagccattcgagggcctgggcgaccatcgccgcgttgacgccggcgttgacctgcacgaagtctcctggccggtaagccagctccagattccactgttccagttgaaagcccaacacagcatcggtgtcgaccggctccggctggccctcgccatgcagccacaattgagcctcatggaaagtgcagaattctctcaacacctgcaggtccgcttcggacaacggcgccatatgccgcagcaacaccgcaacggatgtaccgctgaacaattccacatgccccagggcctggggtttgctcaggcggcgcagcatgttcggcaggcgctgcatgatcggttgcaaggcctgtaccagcaccgggcaatcatcgatggcgacgatgtcctggctggccacggcgcgaaaaccgacgtccaggtgtttcgccttggcatcccaacgcaccgccacgcgggcgcggcgacggtagccgaattccggcccgctcaacggcgcggcccactcttgcggttcgacaccggccacgcgggacagttgctcggcgagcatgcgctgtttcagggcaagctgttcggtgtggggcaggtgctgcacgctgcaaccgccacaacgaccaacgtgcgcgcacggtgccgggcgacgcagttcgctggccttgaagacgcgctcggtgcgtgcctcgacgattttgccgtgggcacccagcactcgcgcctcgacttcttcgccagccagcgcgccgttcacaaaccaggtgcggccctcgaagaacacgatgccacggccatcattggccaggcgctcgatggtcaggcgttgtttcttgcccaccggaatctgcggggcccggctgccgcccgtcggttggaagcgcaggcctctctcgtgcttggccatcagttgggttcgtcgaagatgccggtcgacaggtagcggtcgcctcggtcacagatgatcgcgacgatcaccgcgttttccacttctttggacaggcgcaacatgcccgccaccgcgccaccggaagacacgccgcagaagatgccttcttcacgcgccaggcggcgggtggtgtcttcggcctcgcgctgggccatgtcgatgatgcggtccacacgcgtggcgttgtagatcttcggcagatactcctcgggccaacggcggatccccgggatggccgaaccttccatcggttgcaggccgacgatctggatcgccgggttctgctccttgaggtagcgcgagttgcccatgatggtgccggtggtgcccatggagctgacgaagtgggtgatggtgccctgggtctggcgccagatttccgggccggtgctggtgtagtgcgcctcggggttgtcgccattggcgaactggtccagcaccaggccacggccttcggcggccatgcgctcggcgaggtcgcgcgcgccttccatgccttcttcctgggtgaccagcaccaactgggcgccataggccgtcatcgccgccttgcgctcggcgctgccgttgtcgggcatgatcaggatcatcttgtagcccttgatcgcggcggccatggccagggcgatcccggtgttacccgaggtggcctcgatcagcgtgtcgccgggcttgatctgcccgcgcaactcggcgcgggtgatcatcgacagcgccgggcggtccttcacggaaccggccgggttattcccttcgagcttgagcagcagggtattactggtttcacccgccatgcgttgcaagcggaccaggggcgtgttgccgacgcaatcggcgattgtagggtactgcaaggtcatggcgtattcgcaatccagactgcggggcgcacatcataccgggaaaggctggcgggccatatcacgcaaagtgtggtgcttattgctttagggtataagcacgagaaatcatccgatcacgaacgctgtccattcctggtgggtaaggtcccgaatccgcttgttttcggctgatgcccttgcgtcccgcacgccattgagacgattcacgtactgcccttcactgatcaagccactcgccagttgttgatcagcaacctccaatagcttctggaaacggcggagcctgaattcgagatctgcggcatatttatgttgaataaaatgcacccagaaaggctccttctgtaacaactcaggccagttcgttcccgtctcattattcagtacagccgtgcgcacggtattgaccgaatggacatccggcacagccgcctcaaaacgctgagggagtacttgcggcaaattcaggctcgatgccagggcgatgcgataactcaggacccgtgtgcacgcgaatgccatgccctggggctcaaagtgcctggaaagatactgatctatgtattcaagacgacgtcgtgcacggtagtaatgcaacagatttggcccggcagtttgtacgccggcatcgagtatccgtagcggagctatttgcaactcaagttgatgtaagcacaacaggcaaccatcaatccctccgcgaagggtgcgataacacggtaagtaagcaattcgctccacgccctcatgggacatcgcatcgtcaatcactccccagactcggtgtgaaatgatctccctcatcacacggtggtgggggtcaatgaactgcgggtaatcggcaatgcttgccagcaactcaaagaaataatccgccattggctggttttgcaagtacgcccaatcgagttggcgcgcttgtacttctccaggagggagcagcgccaaccagcggtcgggacgctgatcaaaaggaaccgtcggttcccataatccgaaatcaacatcgggggggccacgacgctcgcccactcggcgtaacaactgtcgcgcctgcgcggaaagcggattacctctcaagttcattccctgatggacttcgggataaatgaacaagtccgtctcggccaggtcctgtatttgattgtcacgcaggtcaaagctgcccaacgtggagagactcaccgcaccgcgcggtaattggctcaacgcgcaattgcgcaggttcagctcccgcaggttcgtcaacctatacacgttcaagcgtcgtccttgcccaagtgggtttcccgacaaatcaaggcttctgagttccgtcagctcagccagtcgttcctcgtccacatagttgaaccgcaggtggttgttcgacagattgagcactgccaggcgcgcgtggaggtccagattgggcagatgagtgagtcgattaccattgagatagagaagacgcagcgccggaaagctgaaaagaaagcgctccggcaacgtcgtcagtcggttgtttctcacgctcagcatagtcacatgagcaaagtgcgcgcgcagggtcggcaagcttgccaaatccagatcgtccaggttgagttcctcggccactccctgagtgaaaccttccttggcccagcaacgctgaatccgctcaaccgccaaggctcgtgaacgggccgatgcgcggtccggctggactgtcgacgcctgatcccgccatgtttgcaagtccctgtacagccgatcacgctccttgacctgatagttgatcaagtcttctcgctctttgaccgtgtcgtgcgcctccgcaagcatcgcccacacctcggcatccgttttaaaggggtacaactcgcgcatgcgcttgatctggttacgctctgtcggcccgaattcggttccaccactgagtgggtagcctttgcgaccattgatcaggcgtggtggtgcgagcctcgatggcattggccgcatgttgagtgtcgattggattcccgaccaatcctgtcccaggcgggctcccatttccgcgcgcaattcctccagcgcgccggcatgggtgtagcccatcgcctgccgctcggccaggggcaatgcgccgagcaaggcctccaggaacggcgcgcgtgcccccaccgcctgcaagctaccatctgcccgttggacgtaggccaggtactgtccgacgctcggtttcaagacccgtcgaaggtcagcatcatcgggaccgacgctgtcgattacgcggtgggcatcccagagttcaacccgcagcgatgtcggccagcccttgagaccagccagttcatggagcatcaaccgagaactgtcgtcattcgccaacggcgacaggtgcacgccttccagggcaccacagacccgcaaccaacgggaccaccaccgcgcctcatgcgccaaggtgtgcggtacgcgcccctcccggaggcgctccaactcagacgcagaagcatgttgcacccagtcctgcgcaatccccacggtcaatccagggaactgacgcactatcacctgtaccaaagggtcatcggaccgctggttcttgcggcgcagcacatcgaaaaactgcgcgtgcatctgcagtttgtccatgtgcaccttgctctccagggccgcaacctgatcttcacgtgcaagacccgccttaccgaccaacgcatcggcattgtcaggcgttatttcatcgagcacctggacaataaactccgaccccatctccagtccttgcttgacccgctcaaagatattcaagcgttcgaacgtctccaccaaaagcaccggcggcggttcgctgcgcatatgcaccttgcgcagtatgtccggcgtcacgccgctgatctgctggaccttgtcgatggcatcgggggtcaatgtgcgaaacctgggacccaggcggtaaaagggtttatgcccgttccaggtcagcgggttctcccattcatgccgccacgcgcccgcgccgttatggctcagcagcggcgcatacgcgtcgtccagggccggatggcggatgcgccaggggcgggtttgatcctcctgggtcactttgaaatattggctatcgatgaacaaatagcggtccgactccagagagtacaaccccaaggcatcgggctcgggtgcaatgcgccgggtgtcgacgtcactcgcgtactgcgcgatgtcgcgcagcaccgggtagaacgtgccttgcggtgcacgattgcgcagcatcgcctgggccacttgatgacgaaacccagtgatggccgcgggcatatcggcgccgaaccgggcgcgatcgtgatcggagagttggctcagtagcacccggaaaaacgcatgcgcgccaccctgctgcacgccggcgccctggctgcccggatcatagggcgaaaactccccatcaccatggtcgaggatcaacacggcatgcttgtcacgatccaggggagcgtaggttgacgggcggacaatcagttgcttgccgatagtcctcaaggcactgcgggcaaacgcctggacccaggcctgggtttgcggatcaaacctgcggcggtggtagatgcggtcaatgagggcctcggcacgcgccatctgcgcggcaaccttgagcgcatcgtagagcggctcgggttgttgtcggacttcaagcaaacgggtttgctggtcggccgacagcggatgctgatccagcacctccagcaacctcggcaggctgacgccggggtgcaatacgcgcagcgcctcgatcacctcgggcaccgggtagtcatgcccaaggctgtcaggcaaccatttacatacggacaccgaagcgcggatagcgctcgagcgatgggtgtcggcaaaccgggtcaaggcttcgaacagatcgaaccgcgacgcctgggcctgggccgccagttgcaaacggaccgcctgttcgccggcggaaaaactcgagggtaaaagttgtaccaccgcgtcggacaggtgcgcggtgatgcgctgcggtgcagagtagccaaactggtggttctccagggcggtaaccgtgatcacaaccgtcgtcgggcgggtcgcatccctgctgtagcgacgtagctcctggccctgtgtgttgacgattctcaacgccgtgtccagcggccacgccggcagctgggtcagcaacgggcccaggacttcgaatgcccccatgggcactggccggttggaatcgaccgagttggcggcccagtcaatcagccggtcggcgttgaaccgatgcgccgcctccaccaacgaggctgatgggcgtgcgcctgcccagacacgttccaattgttcgcgtgatgtgccgctggtttccagcaaggcctgcagctcatgcgcaggcgcctgggagggcagcaacatgcgctcaagcaactgggggctactcagccccgtactgtccttgatgctggcggcgggcatttgcgaaaggcgttgatacaaggcttgatggcgccgccgtacactgaatgccaggcggctatgcagccgcccgctgatcagcaggtcggccaagtcggaaaaggccagcaccagttcacctgcatgcccctccagcacactggacaagccattgagcaacccttcacccagcgccacgaacaacgcgatcgcccttacacgcgccaaccccttgagcgggccgggaaccggcatcagcaatagctccagcacctcgccaatcacagtgcgcgcaataccggcaagggtcgtcagaacccccggcgtctcgttggccaggctcttcaggttagtgcgaatgcgcgccaggtggaggtcgcccaaactgacggggggggctttggtcacgaccttgcgggtatagccggtccggtcctccaggcgaggctcgaacacctcgagaaacagatcctgtaatgcctcggcaaaaggattaagcccgctttcacggatggcgccttgcctgagcctggtcaagcgtgcgctgtcgggctgtgacatgaccgcgtataaccacgccacccggccctgccggtagaaagcactgaacgccacataaaattcctggcaggcttcccggtggttgtcgaaatgacgcaggtcgcccccgcccggccgacggggaaagtaactgaacgcgcctttgcaaccatcaacggaaaacaccagatgggggatgttcaggctgtctcccggcggcctgctgagtatttgcccggtgttgccgataaattgaggcacccaaccgatgttgtccttgccgtcggggatgaacagctgcatttcctcgcagtgcccccacccctcctgctgctccagcgcttgcttgatagcgcggtatttttcccggtcgactcgggtggtgttcgagtctctcagggcttcaatcagggcgaactcaaactccagccgccccagtctcacaatcgcctggcccaacggcttggccttgtccaggttgtcgtcgagcagggttctgagttggccaccgagattgagctcgcgcaccaacgcgatgaaatcctcggggctgaggtcgatactgagcctgctggacattgccacgccgtcatggccggggtaatcccaacccgtcaggccgtcatagttcatgcaggcggcgtcccacagcgaaagccggacgaccttgggctcattggtacggtctgccaggtcgcgccgatgtcgacgagggccgaacgaataggtggtggtgatatgctgggctttggggtcaacctcttgaccggtgaggtctttgaggcccgttcgcaaacgctccaggctttggagttcaaactgtgtgacgaattgacgaacgtttcgttcgacctccgcctgggcctcgatcaacgcccgttgcaggcgtacatattcgcgctggccatcgtcatccagcccggccatgaaagcggcaaatttctcctgcaaggcgtccacggtttgcagggtcgcccactcgtcgcctgcgaccaagggcagcctcgctcgctgctccgccatgaacgccgccaacggatctgcctgctgctgtgtcgctaccggctcaatcatttcacgctccttgaaatgatcagcctatccactacccgtcgatggctccggtagctatgtagcgcattgattcagccatggttcttttcgaataccgctgcgcccatcgccgcgatctgcccctcgatcaacgcgtcgaacggccgcaacaatggctcgaaggaggtgggagcctccaatacctgcagggcctgcgcaatcgcctcgacggtggacaacgcacctggcgagggagccttgcgcagtcgataacgtgacacggcgtcgcccgccaatgtcacccggggcagcactgccagcaacgggttgaggtgcaacaacttgcgcgccttgcgccaggtgccgtcgggcaccaccagcaacagcggggtgtcgtccggcgcatagtgctgcaaaggttgtgcatcgtccgccggaaacaacagccgcgcctgataaccgggtggggtcaacaatgtcgccagatcgtcaaacacctcccccaccaccaactgcgcgttgttcaagcccagcgccgccagcctcgcggtgttcagcgcgtggttgacctcacttgggtgctgcaacagcagcacgcgggtgcggctgtcgaggctggggatcagcgcgcacaggcaatgggtgacgggccgtaggcagcgggaacattggggtctggacatggtgttatcaggcctggttgagctgggctttgagtagatcgcggaaagtctggatcaacggttcacggctgcgaccacggcgcatgatcatcgaaaacggcgcctggtagccgaaggtcgccggcagcaacacgcgcaaatcgcctttgtcggcccaggcctgggcatagtgctcgggcaggtagccgatgtaggcgccggacagcaccaggatcagttgcgcctccatactttccaccgttgccgcgctgtgcttgaagccatggcgcgccagttcggcctggctccagtagccgcgcccgaccatgcgttgctgggtgatgacttgctcgggaatacgccgctcgttgaataaagggtgacgggtgctgcaatacagccagtgctgctcgcggtacagcggcatgtagatcagcccgctcatgcggttggagaaggcgccgatggccaggtccaggcggttgtcctgcacgccgagttgcagctcgtagggactcatcaccgacaaatgcaggtgcaccgccgggtgctccaggctgtaggcgccgatgacttcggcgaatggcaaagccttgtcgctgacagtggagtcgagcacgcccaatttgagggtgccgcgcaactcgcctttcaacgcggcggcgtattgctcgaagccttccagttcaccgagcaggcgcaaggtctcctgatggaacagctcgcctttgctggtcaggctgaacccgccgcggccgcgatggcacagcaccaggcccaacgccgattccagctggctcatataggtgctgatggccgaggtggacaagttgagttcgtgctgggcattggcgaacccctggtgacgcacgacgctgacgaagatgcgcaggagtttcaggtcgggcaaggcgttggccatgggcggctccagaggcacacacaaaatcctgtgggagggagcaagccccctcccacatttaaacgcagtttaccccaggcattagtttagaaaaatctgaactaagtatttgcccctgccgattctttcgtttcccggtatttcgcagaatcaggccctaataaacaaaacaacgatgaggcactcccgtggacaagattttccaccaaccactgggcggcaacgaaatgccgcgctttgccggcatcgccaccatgatgcgacttccccacctgcaaaccgccaagggcctggacgctgccttcatcggcgtgcccctggacatcggcacctcgctgcgcgccggcacccgcttcgggccgcgtgaaatccgcgccgaatccgtgatgatccgcccctacaacatggccaccggcgctgcaccgttcgactcgctgtcggtggcggacatcggcgacgtggcgatcaacaccttcaacctgctcgacgccgtgcgcatcatcgaagaagcctacgacgagatcctcgaacacgacgtgatcccgatgaccctgggtggcgaccacaccatcaccctgccgatcctgcgcgcgatccacaagaaacacggcaaggtcgggctggtgcacatcgatgcccacgccgatgtgaacgaccatatgttcggcgagaaaatcgcccacggcaccaccttccgccgcgccgtggaagaaggcctgctggactgcgaccgcgtggtgcagatcggcctgcgcgcccagggctacaccgccgaagacttcaactggagccgcaagcaaggcttccgcgtggtccaggccgaagaatgctggcaccactccctcgcaccgctgatggccgaagtgcgtgaaaaggtcggcggcggcccggtgtacctgagcttcgacatcgacggcatcgacccagcctgggcaccgggcaccggcaccccggaaatcggcgggctgaccaccatccaggcaatcgagatcatccgtggctgccagggcctcgacctgattggttgtgatctggtagaagtttcgccgccctatgacaccaccggcaacacctcgttgctgggcgccaacctgctgtacgaaatgctctgcgtattgccgggcgtggcgcaccgctgatgagcacgcacgaggtgctgcaagccgctgccgagctggtggcggccttcgcccgcaatgaccgcgccgcctacttcggcgcgttcacggccgatgccagctttgtgttctacaccctcccccagccgctgctcagccgcgatgcctaccaggcgttgtgggacagctggcgtcgggacgaggggttcgaggtgctgtcgtgcacctcgagcaacgccgtggtcagcctgcagggcgacgtggcgatatttatccatgacgtggccaccgagctgcgcatgaacggggagcaattcaaaagccaggaacgcgagaccattgtcttcacacggcaaggatctggcgcacaacaaaaacaaggccggtggctggcctgtcacgaacatttgtccgctatgccggaagggctgccgcccccttagccaatgtgatcggagctgatcatgaataataaaaacaacgataaaagtattcgaaaaatagaaaccaacggggtcgagcagatcccggaccacgaacgtaccgccggccccaaggatctgttccgactgatcttcggcggtgccaatacctttgccaccgccgtgctgggctccttccccgtgctgtttggcctgtcattccaggccggcgtctgggcgattgtgctgggcgtgctggtgggtgcgctgatcctggcgcccatgggcctgttcgggccgatcaatggcaccaacaacgctgtgtcttccggtgcgcactttggtgtgcacgggcggatcgtcggctcgtttctgtcgctgctgacggcgattgccttcttctcactgtcggtgtggagttcgggtgatgcgctggtgggcggtgcgaaacgtctgatcggcctgccggaaaccgacctgaccctggggctggcctacggggtgttcgccattctggtgctgacggtgtgcatctacggctttcgcttcatgctgtgggtcaaccgcattgcggtgtgggcggcgagcctgttgttcctgctgggtatcttcgccttcgcgccggctttcgacagccacttcgcaggcaccgtcgcgctggggcagaccggcttctgggccgccttcatcggcgctgcactggtggccatgagcaacccgatttccttcggggcgttcctcggcgactggtcgcgctacatcccgcgtgaaacaccgaaaatgcgcatcatgctggcggtggtcctggcacaaatcgcgacgttgatcccgttcctgttcggcctggccacggcgactatcgtggcgatcaaggcaccggactacatcgcggcgaataactacgtcggcggcttgctggcggtggcaccgacctggttcttcctgccggtgtgcctgatcgcggtgatcggcggcatgtccaccggcaccacctcgctgtatggcaccgggttggatatgtccagtgtgttcccgcgcctgctgtcacgggtcaaggccaccttgctgattggggtgatgtcgattgccttcatctttatcggacgtttcgccgccaacctggtgcagagcgtgtcgaccttcgccgtgctgatcatcacctgcaccacgccgtggatggtgatgatgatcatcggcctgatcgtgcgtcgcggcttttactgcccggatgacctgcaggtattcacccgtggagaaaccggcgggcgctactggttcagccatggttggaactggcgcgggctgggggcgtggatcccgagtgcgctggtgggcctgtgcttcgtcaacctgccggggcagtttgtcgggccactgggcaacctggccgacggcatcgatatcagcctgccggtgacgctggggctggcgtcggtggtgtacctgaccttgctacgcatgttcccggaaccggcggccgtctacgggcccgccgaccctcgcagcaagcgcacggatgcgcgcgttaaaccggcgctgcaaccagccgcctgatcgcccataaaaacgataatcggagactcgccgtcatggctttggatttattcgtcgtactcatctacgccgccggcatgctcgtgctcggctactacggcatgcgccgcgccaagacccacgaagactacctggtggccgggcgcaacctgggcccgtcgctgtacatgggcaccatggccgccacggtattgggcggtgcgtccaccgtcggcaccgtgcgtctgggctacgtacatggcatctccggcttctggctgtgtgccgcgctgggcatgggcatcattgcgctgaacctgttcctggccaagccactgttgaaactgaagatcttcaccgtgacccaggtcctggaaaaacgctacaaccccatggcccgccaggccagtgcggtaattatgctggcctacgcgctgatgatcggcgtgacctcgatcctggccatcggcaccgtgttgcaagtgttgttcggcctgccattctggatttcggtgctgctcggcggtggcgtggtggtggtgtactcgaccatcggcggcatgtggtcgctgaccctgaccgacatcgtgcagttcgtgatcaagactgtcggcctgatgtttatcctgctgccgatctgcctgtaccgcgtcggcggctgggatgagttggtcgccaagctgccggcgtcgagcttcagcttcaccgccatcggctgggacacgatcatcacctacttcatgatctacttcttcggcatcctgatcggccaggacatctggcagcgggtgttcaccgcccgtgacgaaaaggtcgcccagtacgcgggcaccttcgccggtttctactgcatcctctacggcctggcctgtgcgctgatcggcatggccgcgcacgtgctgatcccggacctggacaacgtcaacaatgcgtttgccgctatcgtcaaagcctcgctgccagacggcatccgtggcctggtgattgccgccgcactggccgcgatgatgtccactgccagcgccggcctgctcgctgcctccaccgtactgaccgaagacctgctgccgcgcctgcgtggcggcaaacagtcgagcctagccgtcaatcgcctgttcacaatgctgaccggcatcgccgtgctgggcatcgccctggtggtgagcgatgtgatcagcgccctgacgctggcctacaacctgctggtgggcggcatgttgattccgctgatcggtgcgatcttctggaagcgcgctaccacctctggcgcgatcacctccatgaccttgggctttgtcaccgcgctggtgttcatgatcaaggatgggctggatgcgaacacgccgatctactacagcctggcggtggggctggtgagctttgtggtggtgagtttgttgtcgcgtcggccagaaggtgtagcggccagcgcggtttgagaaaaagcgggttttagaggggtttcttcagcgggcgcgacgtcggatgtcgcgcccgtttttttcactcaaccgccaggttctggtttgcctggatgatctcctggaccagggaggcccataccagtccttgggttgtgccgccggcgtaggcttctccggctgctacttggtgatgggcgcaacagtgaactatcgaagttccgtcctcctcactggctataacgacgaagtgccccctgctctgctcggcgatctgaacccgactcagaaactgtgacggaaaccgaaccccggagcctctcaaaagcgcctcgatctccttcttcaaatggataagttccaggccgtagcccggaacctcaacatccctagcccgcgcgaatggtgcgagcgtcgggttgtcagccagaaacttttcaaacagctcgatacctgcacgattgcactcaacggccaaatacggatcggcataactggcgccatcgctcttctgatctcccccatacacggtgacctgataattcgccaaccggagcattacggcctggaacaggccattgatgcctctgccgataatcgatacacgcggcgcactggaatctaccggcagagaagggagcgtcaatgattgtgcaagtttacgcctgaccagaccgcgcaaggccgtcaaactcagctgtattgaaacggcatagtcaaggtcgcgctggcaggcctcggtggttgatgcctgggtagtgagcgtcgcaggcctgtaccaggtggagacctcgcagccgagcgtctgcgtgcgttgccggaacgcatccaatgtcgcaggcccataatccaataccagctggatatgttcagcctcggccagggcatgcaacgcaccgtcgctgaagacgtccggcttggcgacacagatcaggcgggcttggctgtgcaggcactgaatgcgggcctgatcaaggcgatgaacggactcatcattgagggatacgcacactgccacagcagcggcgccctccaaggcctcgaaccagtccacgacaaatgacactcgactgtcggaagcggcattcccgagagtatccggcgctcgacctggccggaccagcactctgatccgaacatttggatctcgatcaagcaacaggttgaccagttctttccccacattgccgtatcccagtacacgcacgtcacggggaatggaaccatcagccagtctcagccaacgcaggatataggcggccacatgcggcgcattcacccctggggtgttgagtacttgaatggcgtgggattcacacaggtccagtcgtatcttgtccaaactcgtacccctgcggatcaaacagaggtttccaaaggggtgggaggtacgccattgctccaggacatctgcatcgatgggttggtctccaacaatgatggttgttggacgcaggagcgcgatctgtatcagcagcgcctgcctggtcaatgccggcgaaagaaacacgacgtttctgggtgcctcggccttccagcttttcgacacaggcgcagcctgtaaaacacagtcggtggtggtgatgagtgacgcggcgaccggaggaactgaagagagcaacatagctttgtctccaacaactctgactgacacctcgaaaagaggcactcaataacgttggggcgctatgaagaggcgcttgagtttcaagctatgggtatttctggaattggataagccagccgtttccgagtgacaggtagtccgattccgacaatcgaacgccaagggctgaccggcagacccacagcgcttgctcactcctccccgctgctgagacctttaaacaaatcaacacaatccttacagccgaaatattgctcgactgccgggcattcgatctcccctgtcgcccccgccctcacccgccacacacacgccttgccatgatatttcagtgtgccttcaaggtaacaaggcgcccagtcgtactcgtcatgcagcgtgcctccatcaatgggctcagcacgcttgaaaaaggacgcgacctgtcgctcatccagcgcaacgtcactgggtcgacagcgttccggctcttcggagtaaaagcccaaaagggcaatttcgtcgatatcgggaggggaagtcgtgcatccggcgaggaatacccacacgccaagtgaccatcggcgcagactcattgccacaccgcactgctggcttcgccggggtgtttgtaagagatttgcggatgcctgtagacgtcctccggcgtcaggcggaaatgaccatataactcccccaccagccatcgcagagattgactctgcatcgcggtcacttcctcataacgtgcagcatccagatgcttgccgaccaattcgatgcccagggaatccgcattcatcgggaatcgctcaggatagcccttggtgcgttcataccgatccagcgcgcggatctgcaaggtccaggtgagtgcttgaatagcttggattcgggcggggtcgcacgtcgccttgtccgttgccatgcacctggagcgcaggtagcggccaacgtgataacaacgtttcttgaggctggccgtctggtagatcacaccatttttctcaatgagaaagtgtgctccgttgccttttgcaagataggcgttaaaggtgtgctgggcggtcggggcatctgtctggtgaatcaccagcgcgctcacgctgcgcaaatccccgtgctcgatcgattgaaaccgacggagttcgactctgtcggcaatcaacatcccttcgctatcaatactcgacatgccactgcccattcatccatgtgaaggcaaaaatatagaaggacaaacagggaaaagggcatggatgacgggataagaagaaggctctgacgatgacacgtgcctcgtcagacaattgggcacactacccaatgaacgggaatacagtctgattacagggaaccgaacacgccctgaagaacaacccagccatgagcgcccgcgcgattcaatcgcgtgagcgcttcaggacttacctgcgacgtggacgacgctgctcgtcatctgtgcgaatcggtaccggctgcagcggaggctcgatcaagcccaatgcaacacccaggtcatggagccagttttgaattttctctttcatggttgccccctttgagggtaatgcgggtaggcgcaagttctgtcgccctttcctacagtgatagtagccctaagtcctacgtattgcttgaacgaaaacacaacgaactattactgaattcatcaaaatcctgccggatcgctcaagcaatggcgcgggtgtcttgcacaaccgcagccttgccggcttgctgcaggtcgatccatgcgttgaggttagcgccgagcataccctttcgccacatcagccaggtggtcgcagtggcaaaaggccctatcagcggatgaacggacacgctgtccttgccgggcaggctgtcgagcatggactcggacatcaacgccacacccgatccggcgatcacgcaggcgagcataccttggtaagactcgatctcgatcgcccgccccatggccacgcgctcgtgggaaaaccaggtctccaggcgggtgcgataggcgcagctgcgacggaaggtgaacactgaacgccccgccacatcctgaggtccacgcacgggcggatgatcggcttcgcaaatcagcaccaggcgctcttcgcacaaggcgatgccgtccagggaggcgatggtgatgggaccgtccacaaaggccgcgtccaggcgaccggtgatcaacccttcgagcaactccccgctgggcgccgattgcacctgaaggttcaccatcggataagccttgtgatagcccgccagcaacttcggcaaatgcaccgcggccgtgctgtacatgctgcccaatacaaaatcgccagccggttgcccaccttgcacggcaccgtgggcttcgtcatgcagggcgagcagacgggtgctgtagtccagcagcaccttgccggcaggagaaagctgcaagcgttggcgctcacgcacgaacagctctacgccgagctgctcctccatttgcttgaggcgcgtcgacaggttggacggcacccgatgcaagcggtcagccgcacgggtaatggagccctcttccgccacggcctggaaaatgcgcaattgactgaactccatgactttctccaaaactgaacaagttactcactattattcaattttacagaaagtcaatccgtcttagcctgagggtattcgcttacctgcaggaaacctgaccatgtctcccctgattcgcttaactgccagctttgtcgccttgatgatggcgatgggtattggccgcttcgccctcaccccgcaaatgccgcacctgctcagcgaagggcagatcgacttgactggtgcgggcctgatcgccgccgccaattatctgggctacttcgtgggcgcggtggattcgatcttcgcgcgcagccatcaccacgtgcgtggccgtttgtatggcgggttgtggctgtgcgtgctgctgaccctggcgtcgtactgggcccatggtttctggccgcatctgttgctgcgctttggcaccggtgtcgcgagtgcctgggcattggtgatgatcaccagcctgagccagccgctggcgatcgccgccgggcgtccacgtctgggtgccttggtgttcgccgggccggggctggggattctgttgacggggctgctggcgctgggctccaacctgttggggcaaagctcggcaacgctgtggctggtgtacggcgtcgtggcactgctgatgttgctggcgattctgccgttcctgcccaagccttctgccgccggcgctcccattgccagccatagcgagacgggcagcaacggcagcatcgcgcatttgtgctggatctacgtgttgtacggtctgggctacatcatcccggcgacattcctgtcgcagatggccagcgcacagttcaagggcgcctggcaggctgacctgttctggccgtgcttcggcctggcggccgcgatcggtgtggtggtggcgaccctgcgccgcaaggacccgaacaccacgcgccgctggttgatggccacgctatggctgcaagcggccggggtgtttgcctgcttgctgggcaatggctggggcctggcactgggggtcctgctgtgtggcgggccgttcctggcctgcatgcagttggtgatggcccggctgcgggacgtcgcgccccatggctaccagcgcagcaccgggctgttgaccgccagctttgccatcggccaattgagcgggccgttgctggcgtcggtcagcagccacttgagcggtggcctgcaaccggcgctggtggtcgctggagcaggcttattggtagcgggctcggtgctgatcaaccggcaaccagcggcgcaggcacacgcacctgttcacgccgcgccagtaccaggaaaaacagcccacccagaaagcacccggtaaaccaggcaaaattggccatgccctgcaaggccggggtgaaagtgatcgccacgcccaccagcgtcgcgggcaccaatgccttgaccgccgtccagttcacgccaccgtcgaagtagtagcgcccgctggggctgtcatcgaacagtgcatccacgtcgatctgctgttttttgatcaaatagaaatccaccagcaggatcccgaacagcggcccgataaacgccgcgaggatgtctagggtgtagtggatcatcagcgggttattgaacaggttccacggggtgatgaagatcgacgccacggcagcgatcatcccgccggcgcgccagctgatcttgctcggcgcgacgttggcgaagtcaaacgccggcgagacgaagttggcgacgatattgataccgatagtcgcggtgacgaaggcaaaggccccgagcaatacggccatgctgttgtcgatgcgcgacacggtggcgatcgggtcatgcagcatttcaccaaacaccggtaaggtgcccgagacaatcaccacagtcaccagggaaaacgccaggaaattcaccggcagcccccagaaattgccgcgtcgtacgtcctgcatgctgcggcagtaacggctgaagtcgccgaaattcaaggtcggcccggagaagtacgacaccaccagcgccgtcgccacaatcacctggccaaacgcctgccagcccgacagggatttttccgccagggtaaagctgatgttcgaccagccggccttccacacgatccaacccgccagtgcaaacatgaccgcgtagaccaccggccctgcccaatctataaaacggcggatggactccatgcccgcccagaacaccgccgcttgcaacacccacaggctgaggaaaccaaaccagccaaggtaggacaggcctgcaaaatgcggctctgcatacaccgccatctgtgggaagaagcgcagcaccacgatgatcaaggcactcgacgccaggtacgtctgaatcccgtaccaggccacggcgatcaagccgcgaatcaccgccggaatattcgcgccgaacacaccaaacgccagccggcagatcaccggataaggcaccgcagcctgctggctcggcttggccaccaggttggcgatcaactgcacgatgcaaatgcccgtgagcaacgcgatcaacacctgccaactggccagccccagggcgaacaggctggcggcgaacacatagccgccgacgctgtgcacgtcgctcatccagaaggcgaagatgttgtaccaagtccacttctgcggcagcgggcccaagtcctggttgtacaggcgcgggctgtagcctttgggcaattgttcggtcatcgctgggctcctcgaaatacccgcctgcgcttccgtcgcagggtgcatacgggaggcggcatggtttgtatacgagacagtcagcagaatgcgtgccaattgaacgcaatccctctggcacggcgctccaaagggttgataagcgcgtatagggtggcgctacgctcagcaacggtgcacgtagatcctgtacacaatcagcggtgcactcgttgtgcacacaggtaacccaccgtgcagcatgcggcggtcaggaacgtcccccatgccatgtccatgatcgccaattgcgcggaccagccttgcagcgtggcccagttactcaggtcataggtgccgtaggcgaccaggccgagcaaggcgcccaggcgcgcggcgcgttgccaacttgcactgggcaagaccacgaacacgacgcaaccgagcacataaaggagatagaacagcgttgccggcaacagccgaggttgatccagcatcagtggacccaacagggacttataggtgggccccatgatgacgccgagccagaggccatccagaatcaggaaggcgagcaacgtgccaaggtaggcgaacagcgttttcttattcattgaggcgacctctgtagacgccaatgggcgcctacagaagagcaaaacgcactcagcttagttcaatgcgatccgcatggatcacgatctggccctgcttatacagcgcaccgatggccttcttgaagttgcccttgctcacgccgaacaagttgctgatcaccgcggggtcgctcttgtcactgaccggcaaggtgccgttgttttcacgcaacttggcgaggatcttcgagttcaggctggaggccgcttcctggccgaccggttgcaggctcaggctgatgttgccgtcggcgcggatctctttgataaagcctttttcttctttgcccgggcgcaggaacttgaacacttcgttcttgtggatcaggccccagtgcttgttgttgatgatcgccttgaagcccatgtccgtggcttcggccaccagcaggtcgacttcctggcccacctggtagttggccggtgtcttgtccaggtagcgatccaggcgcgcggtggcggtgatgcgcttggtgtgcttgtcgaggtagacatgcaccacgcagtattcaccggcggtaagctggcgcttttcttccgaatacggcagcagcagatccttgggcaacccccagtcgaggaacacgccaatactattgacttccaccactttcaaactggcgaattcgccgacttgaactttgggtttttcagtcgtggcgataagtttgtcatcgctgtccagataaatgaaaacattaagccagtcttcatcttcactgggaatatctttggggatataccgattgggcaagaggatttcgccatcttgcgcaccgtccaggtacaaaccaaagttagtgtgtttaaccacttgcaagctgttgtagcgcccgactaaagccatgtccaataccctcattacgtgggcggcattctacccgagttgcgctcgccacgcgcgcgcgcctgaaaaatcgcgggctggcgtggccttccgatggcagtgccccgctcgtccgatcaatcggctgaattttccatggttggcaagcgccacccgcccccatggtttcgagttaaaacagtaagttaggggcttattgataagatgaacttcggcgatttccggccgccgtacttattctcaggggatatttaccaagcaattgtcaagtatttcctgtacgatgcctggccaagttaattttctacaggttagtggccgccatgcgcgtaaaagcatccaacagcaaagcaaagccagctcccgccgttgaaaccagcgagtcgatcaacagccagattgcggcgttcctcaagtccggcggcgaaatccagcaaattgccaagggcgtaagcggccagactttcggcccgtccaagcagatcagcctgggtaaaaagtaataccgcgcaacccccctggtccctaagcgtcttgactctcaaggcgctaggactagagcccgaaataccccttctgtacctctaatcgacgaacgggcctcaccgcctggcattcgccggtatgcttgcacacgtctagcacgggcatctgcccgattttctccgtcactgctcctcgcttttcatggagtgaagcatgttcaaaccctgcatcttcctggtctttgccctggttgccagccctctcgccgaagcgcagatcttccagcgcgaattgggcgacttcgacctgaaattgggcaccacgcctagccgcagtatggcccaaggcctggtcaagccaacctcccccggcagtgactcgttccatggcgggctggacctgagccacgacagtggcctgtacttcggccagttctcaccgaacatgggcttgtcttcgtccagcaacctcgaagtcgattcctacatgggtttcaaacaccccttcgaccagaccctgggctacgaagtgggcctgatccactacagctaccccaagctcagccctctcgacagccaggagttctatggcggtctgaacctgttgggcaaccgcttcggcgcatccttcagcaacgaccctgaccgccaggacagtaccctgttcgccgacctcggtggcacacagccatttggcattggcgtcagcatgaaatacaccacccatcagttgggcaccccggtgtcggtggacggcggctccattcgcagcttcagcgactggtcggtgcaattctcccgggaatggatgggcgttgacctgaacctgatctacagcgactccagcctcagcggcggggattgctcggcctattccggacacaattcgcaatgcgatggcctgttgacgctgaaggccgcacggtcgttttattgatgggctgaactgtcgcacccggcgcaggttcacatgtgatatcccactctgcgaaggacccgccatgctgcgtcggctaaaactactggtgctgttgctgaccctgagcctggtgctcgccggctgcaatcgcgtgggcctggcctaccgcaatctggacgtgatcatcccctggaccctcaacgactacctggacatgaacgccgggcagaagagctggttcaacgacaccctcaagcagcacctggcctggcactgcaccacgcaattgccgggttacctggattggctggaccgcctgcaacagatggccgacgacaaccacgtcaccgacgccgccttgcaggcccgtaccgccgaagccaagcaggccatcgacgacatcgctcgagagatcactccctccgccatccagctgcttcaaggcctggatgatcagcaggtcaaggacatgaacgacgcgctggccaaggacttgcgcaagcgccaggacgaatacctcaagccgcccctggcccagcagatcaaggaacgcgccgagcgcatgagcaagcgcctggacgcctggatcggcccgctcagcgccagccagcagagccgcgtgaccgcgtggtccatcgccctcggcgagcagaaccgggaatggatcggcaatcgcgcccgctggcaggcgcaatttatcgaggctgtgcaacagcgccgcagtgccgatttcccgcagaagatccagcagttactggtggaccgtgaaagcctgtggaccccggagtacagagcggcctacgcccagaccgaagcggcggcgcgcagcctgattgtcgatgtgatggccgaaagtacgctgcaacaacggcagaaactcacccagaaaatcgacaaggtgcgcagtgatttccaggcacttaaatgcttgaagagcacgcagtcctaaccgggcgccaacgtccccagccaagccaccagcgccaggatcaacaccactgcggcagactccaacacaatgctgcggcgcagtgctttgcttgccacggtaatgtcgcccgccgccagggcgcgttgcagcaacggcgtgaagtgcgagcgattgagcgccgccagccccagcatcaaagcgaacaggcccaacttgaaacacaacaggaccgcgtaggtgccaccggtgatgccatcgagcttcggcccgaccacaaacagataattcgccacgcccgtgccgatcagcaccgctacgaacagcatgcccatccgctcgaaagccgccagcgcgtgtgccaacctgtggagcgtcgacaaagacgtgctcctcaacgccaccccgaatgcagccaacgcaccgacccaacccgccgccgccagcaggtgcgcactgtcgctgagaacgtgccataccccctgcgtgccttcatgcatcacgccgtgccccgcccacgccagcgttaccagcgctatcgcaccgaacagcggtgccattcgggtattgagcgcaaccagcgccaacgccaccattcgcaggcaccaggtccaccccagctcggtctgccagagcatcatttgcaggtgcggccacaacatttgccaatcttcggcgccgctcatggcctgggtcatgaacagcaacgacgctaccgaaagcaatccacccaggcacgcagtcagtcgcaacagcgactgcagattcaataggcggcggtcgccatagaggccgaacaaccccaggccgaacaccagcatcaagtccagataaagcgcaaaacgcaggagtatcgagaccgcttcactcatggctggacgctgaacatcacattacccaggatcgggtgcgtatcggacgacaccgcgcgccaatccacccggtaagtacccgccgtcagcgcggacgccggcttgatcagcatcaccttgggatcggtactggccgcgacactggccttcaccggcatcggcgaatggaacatgccgggcatgtcagtcatggtcagtttggcaccggaaaactgcgtcagcaggttttccgagaagcgcagttcgatcacggccggcggcgcccccttggccccatccgatggtgtagacgacagcagcttcggatgagccgataccgccaggctggtaatcagtccggcgcacagcacagtagttttcaacaatgacatgcaaggctccaggccgctcatggcggcgagtaagttataggatgggtaaaaccgtcagaaccacattcgcacaccaaccacccagcgccattggctgatgtcttcgccttcatcccgggcgtattgcgcggtctggccgtagctgcggttccagctgacgcccacgtagggcgcgaactcacggcgcacttcataacgcaacctcaagcccagctcactctccgacaggcccgagccgacgccgcgctgtgggtcgttgcgtccatagaagttgagttcagcggtgggctgcaggatcagccggttggtcagcaggatgtcgtagtcgccttccaggcgagcagcggtacgacccgcctcaccgacaaacaacgtggcttcggcttcgaagttgtacagcgccatgccctgggcgccgaaggccgcccaggtctggccgtcgcctggcttgaagtcctggcgcacgccgcctaccaggtcccaccacgggctgatggcatgcccccacagggcctggacttcggcgctttcagtgcgaccggcactgcgctcgccttcgctgcgtagccacaggcggtcgatatcgccgccgacccagccgttgatatcccagttcagcgcgcctgcaccgtcaccgccctgccattccaattggttgatcagcagcaaagagttgatgccactgtcgtgaaccctgtgcccaccgggggcgttgtacaccgccgcgcgatcagcatcggtcagggcaggaatcggtgtccggctctcggtgagcgccggtgacgccgggctcatgccctggaactcgtcggcctgcaccaacggagcgaacgccagcccgataaaggcgaataaaacacgatggctcatgcttgcgtccttactcatgcacgcgcacctctcggaacatgcccatttccatgtggtacagcaggtggcagtgataggcccagcgccccagcgcatcggcggttacccggtagctgcgccgcgagcccggcggcatgtcgatggtgtgcttgcgcacctggaactggccgttttcatcctccagatcactccacaagccatgcagatgaatgggatggctcatcatggtgtcgttgaccagcaccagccggacccgctcgccataggtcaattgcaagggttcggcgtcggagaacttcacgccattgaacgaccaggcgaacttctccatgtgcccggtgaggtgcagctcaagggtgcggctggggtcgcggccgtcagggtcttcaaaggtgctgcgcaagtcggcgtaagtcaggacacgccggccgttgttgcgcaggccgatgccggggtcgtcgagcttgggcaccgggttcatggcctgcatgtccaccagcgggttgccttgctcgctggccggatgggcctgcatcgacatggcgcggtgatccatgcccgccatgcccgccatgcccgccatgtccggcatatccgccatggcgccgtggtccatgccgcccatgcccatgtcgtccatggtgatccaggggcgcgggtccagcgccggcaccgacgcgattgctcccgcttgaagggccagcgtgccgcgggcgtaaccactgcggtccatcgactgcgcaaacagggtgtaggcggccgcggtaggttcgaccagcacatcaaaggtctccgccacggcaatgcggaactcatcgacactcactggctgcaccggctggccatcggcggcgatcaccgtcattttcagccccgggatgcgcacatcgaaatagctcatcgccgagccgttgatgaagcgcaggcgcagggtctcgcccgcccggaacaggccagtccagttgcgttccggtggctggccgttgagcaggtaggtgtaggtctcgccgctgacgtcggccaggtcggtggggttcatcttcatctgcgcccacatcaggcgatcggcggcggtggccgaccagccctgcttgcccacatcccgcacgaaatcgcccacggtgggtttgtgcaggttgtagtagtcggactgtttcttgagggttttcatcagcgcaaccgggtcttcatcggtccagtccgacagcatcaccacgtagtcacgttggtaagtgaagggctcgggctccctgggatcgatcaccaacgggccatacacgccctgctgctcctgaaaccccgagtggctgtggtaccagtaggtgccgtgctgcttgagcgtgaactggtagacaaacatcccacccggctcgatgcccttgaagctcaagcccggcacaccgtccatggacgacggcaggagaatgccgtgccagtggatcgacgtcggctcggccaggcggttcttcacgcgcacggtgaccgtgtcgccttcgcgccagcgcagcaaggggccaggcaggctgccgttgatagtcagcgcggtacggttgcgaccggtgaggttgactggcatctggtcgatgaacaaatcaaattcggtacccgccagcacggtgggctggccgggactggtgagcgcccagaccgggctgcgccagagccctagcccgctgagcaagccgccggcggccaggcctttgacgaaggttcgtcgggtggttgtggggtgcatgccgattcaattccatgagttgaatggcagcagattaagcacggccggctgtcagccagcttagcggcagattaccgatctgacagtttcgccccggctttgcgacagtgccggggcgtgaaggggatcaggcgatctgcgccttggaggccacctcggcaaaggtcgtcgggtcgagcgcatccgcctgctcgtccagcacctgacgcgggtgatcgttgcccggaatcgaactgtcgatcagcgccagcaactgtgcgccgagcggggtcaggataaaattctcaccattgccgccctcctcttcagggcgcgactcgatgaagccgcgcttgaacaacagcgcttcataatctgccgcggtcttcttgagcgcgtccaggttaccggtgggctcgcccgcggtggccttctcggccgcttcctgctcggcgtatttgcgtggggcgaagctgccctcgccgttctgcacttcatgcagcagacgttcgatcagatcccagttgtaagtcgtcatcctgattcctcctgcaggcgggtggaaaatagcctgtctaggggtgtgacacgccctgtcggtcaccgttcagccggatagacggacgtcatttctctgaactttccagacgttcgcggcctcaacagctcatatccgccaaggaggtgtgcccatgaaaaccctgatgaacctggccgtcgcggccgcgctgtttagcgccctgcccgcctgggcctgtacgcccgacgaagccacgagcaagcgcgagcaattggctcaggaagtgaccaggctgaccgaacagaatccgaccaaggccaaggagatcaacgacgaactgcagaagatggacctggatacggaaagcgcggagttccccgacaaatgccaattgatcgacgcccgcctcaaggaactcaaggaagccgccgccaaagccaaaaactgagggcataaaaaaaccggacaatcgtccggttttttcacatcacccgcgccttagtcggcagccggggcttccggcttgcggcgcttgagcggtgccatgccgtccttgctgacgagcgacaggttgtcggtcttcggccggttggcgatcttgcgtttggtcggcgacttggcgccggttttcttcttgtcgcccttggcgtcggtctttttcttcttcacaccaacggccttgcccgatgccttgaccttcttcggcccggtgtaggtgcctttgacttccttgatggtgcggcgctcgaacgactgcttgaggtagcgctcgatgctcgacatcaggttccagtcgccatggcagatcagcgagatggccaggccatcgttgccggcacgcccggtacggccgatacggtgcacatactcgtcgccgctgcgcggcatgtcgaagttgatcaccaggtccaggccgtccacgtccaggccacgcgcggcaacgtcagtggccaccagaatcttcacgccgccggccttgaggcggtcgatagccagcttgcggtccttctggtctttctcgccgtgcagcacgaacgccttgtactcctgggccaccaggcggccgtagatgcggtcggcggcggcgcgggtgttggtgaacacaatggctttctgataggtctcgttggccagcagccagttgaggatctgctctttatgcacgttgtggtcggcggtgacgatctgctggcgcgtggtcgcgttgaggtcgctgacgttgttgacctgcaggtgctcagggttgttcagcaccttggcgaccatctcgcgcagggtggaaccgccggtggtggcggagaacagcatggtctgctggcggttgacgcattcgcccaccaggcgctgcacgtcgtcggcaaagcccatgtcgagcatgcggtcggcttcgtccagcaccagcacttcgacttccttgaggtcgaggttgccggcgttgagttgctcgatcatgcggcccggggtgccgatcaggatgtccggtaccttgcgcagcatggcggcctggaccttgaagtcttcaccgccggtaatgatgccggacttgatgaaggtgaactgcgagaagcgctccacttctttcaacgtctgctgggccagctcgcgggtcggcagcaggatcagggtcttgatgctgacacgaaccttggccgggccgatcaggcggttcagtacaggcaggacgaacgcggcggtcttaccgctaccggtttgagctgtcacccgcaggtcacgcccttcgagcgcgagcgggatggccgctgcttgcacaggcgtaggctcgacaaatttaagctcggccacggctttgagcaggcgttcgtgcagggcgaattgggaaaacacgggtgctacctcgaagaaatacaaaaaatcagctgcataggttaccggtttcgggcgcccaaaccgagtttctttacgcgaacggtgctaatcggccgcttttttgtcaggacatttgtccacgacgtcaactttgttgcacttaaatgctctaatcgccccgtcttgtcccacagaagaatcggtttcacccatggatatcaaacagctctggctcaacgcccaggacctctggggcgccctcgatgaacacccgctgctgcacgccagcctcggcttgctggtgttgctggtggtggcgctggtgctcggacgagtggcgcgctacctcattctccacgccgtcaaactgcttggccggcaaccgtccctgcactggctcaacgacctgcggcacaacaaagtcttccatcgcctggcccagatgacgccgtcactggtgatccagttcggcctgtacctggtgccggacctgagcaagaccgccatcctgttcatcggtaacgtggccctggcattgagcatcctgttcctggtgctggccatcagcgccctgctcaacgccctgctggacatctacgcccgcaccgaacacgcgcgtacccgctcgatcaagggctacgtgcagttggcgaagatggtgctgttcgtgtttggcgcgatcattatcgtcgccaccctgattgaccgttcaccgctgttgctgctgtcagggcttggcgccatgtcggcggtgatcctgttggtatacaaggacacgctgttgtcgttcgtcgccagcgtgcaattgaccagcaacgacatgctgcgggtcggcgactggatcgagatgcctcaggtcggcgcagacggtgatgtagtcgatatcaccctgcatacggtcaaagtgcagaacttcgacaagaccatcgtctccatccccacctggcgcctgatgtccgaatcgttcaagaactggcgcggcatgcaggcctccggcggacgccgcatcaagcgcagcctgttcatcgacgccagcggcgtgcgcttcctgcgcgacgacgaagaactgcgcatgacccaggtgcacctgctcaccgactacatcgggcgcaaacaggccgaactcaaggcctggaacgaagcccaggggcacagcgcgcaactgtcggccaaccgccgccgtatgaccaacctcggcaccttccgcgcctatgccctggcctacctgaaaagccacccggacatccagccgaacatgacctgcatggtgcgccagatgcagaccactgcccagggtgtgccgctggagatctactgcttcacccgtaccacggcgtgggcggattatgagcgcatccagggggatatctttgattacctgctggcggtgttgccggagtttggcttgagtttgtatcagcagccgagtggtaatgacttgcgtgcgggggtgttgccagcggtgttgggggccagtcacttgcctgcaccagaaaaagccttgagctagaacgcttcatttccagggatgggctgcgtggcctgacgcttcgcagcctccctccagtgactccaatcgatcagtgcagtcggaagtcgatcgtgactttttatccagacacacagacctggatcgatccactgtacgatttccgtgatatcccgatgcagatcgaacagcggttgccacaggagcggctcatgatgaaaacaacgatttcgtagatcccgcgcattgttcagtcgactgcggatgacgtccgctttcttggcgttcttcgggcaatagaaaaataccttcatcaacggcttcgaaacatccgggaacgatttacggttgaacagcgaggtccagaagccaaagctcaactcggcggtaatgtcgtcaggaccagggtccacacctcttttattgagcgccgcacgtgcgtcgtccactttttgatagctggaaagaagctctgcgttagtgcttaccctgaaggcctcgtaccaatcgtcacgcccgtactcgcgtaccatctcgcgctgaatagcattgcgcagccccacttcaagcacgtgaaaaatcgacaccagggactctgcgatccgcatattgtgcacgtaggcagcggcagcgtgctcttggttgccctgatgccccataagatagcggctcattcgtggtgtggagagctttgcctccagtgtttgccagaccattacccgccacctcccttcagcgcaaagacatgtacaagcgcgagcgatggtgcaggcagattttttcgcctgaaataaacacactattgccaaacaatgcagccgacctacatcgatgccaggtggggttgacgtaaaaaccaaggctggtaatctcaccccgcagccctaggaacctccactcccgtgcgagatgaaacggtgacgagactaggttatgtgacggccccgctctgcggggcctcctcatttctggcgatccaacttttcgctacgactcgtttttcaccgcacgactgttcagttgatggcccaaccgactgatccacaccgcccccagaatcaccaacccacccagggccaaccgccccagcggttcatgctggttccagatcagcaaattcaacagcagccccaccggcacatgcaggttgttcatcaccgccagggtgccgccctgcaccaggcaggcgcccttattccaccagtacatgcccagcgctgtactgaccaggccgaggaacaccagcacgccccattgcagcggcgcctccggcagaaagttggctttgccgaacagcaggaatgccggcaacaccaccagcaacgcgccgaggtagaagtaaccgaagcgccggtagtgcggcagattgctcgggtaacgcgccaccaggtgtttgtacataacttgcccggcggcataggtgaagttggccagttgcagtagcaggaagccaccaaggaagtgcggggtgatctggtcgaagcgaatcactgcggcgcccgctaccgccaccagtgcggcgaccagcgcccaggggttgaagcgacggttgagggcgtcctcgataagggtcacgtgcagcggcgtgagaatggtgaacagcaacacttccggcacagtgagtacacgaaagctcagatacaggcacacgtaagtcacgccgaactgcagcgcgccgatcaccagcatgccgcgcatgaaggccggttccaccgagcgccagcgggtcagcgggatgaacaccagcccggccagtagcacgcgcaccagcacggcgaagtagctgtcgacgtgaccggcgaggtattcgccgatcaagctgaaggaaaatgcctgaatcagggtgacaaccagtaaatagcccatgcgcgcctcgtttcgaatgggcgggacattaaaggttttcggcggttgaagaaactcggggcaaaaaaaacccgacctcgctaaagcgtcagtcgggcggtagcactcaggagcaatagtgcaaagggaggttcgttacgcgtacttgaagggttggcgtgaagcgatataaacaccgcgcgattatgtgacgattaaaggatcaagccacctgagccagcagcgctttggcgtggttgatgcccttttcctggaagtccccgctcaggttcaccccttcggcatgaatgaaggtgacgtcatgaatcccgatgaaggccatgacctgacgcaagtacggttcctgatgatctgagctggcgccggtgtggatgccgccgcgagcagtcagcacgatggcgcgcttgccggtcagcagaccctgggggccggtggcggtgtacttgaaggtcacaccggcacgcaacacgtggtccagccaggctttgagggtgctggggatggcgaagttgtacattggcgcagccatcaccaggacgtcggcggcgagcagttcgtcggtcaatgcgttggagcgatccagggaggcctgttcgttgccattgcgctgatccgccggcttcatccagccgccgagcaggttggcatccaggtgcgggaccggattgagggccacgtcacgtacggtgatctgatctgccgggtgggcggcctgccattggctgatgaactgttgggtcagttggcgggaaattgaatcctgctggcgggcgctgctttcgatgatcagaacgttggacatggcgttgtaggctccatctgtaattgctgtaagtcgatggagtgaagattaaacagagccaattcgattaaaaagcgcaaaaaactgctataacccatctataaatttgtttataggcggagcatgctccgctctcgggttatttcggcgtgcaggccagggcgatacgcatcttgataatcgcgcggttgaacttgaccgtggtgttagtgcttttgcccgccggcaccgtgaccgtacggcgacgcggcgattccgggccgttggtgaaggtcaccgagcacacagcatcgtgggtgccgtagttattgagttggatcgagctgatatcgccgtccacgtcggaggcggtgtaatcgatgctcacaccgtcgatcttcttggtcacgtcgatggggtaggcaaacgcgctcatcggcagcagcgccagcaacacacaacagaattttctcattcggcagtctccaataaggacagccagcttaggacaagaggagcccatcttgaaagcgccccgcgttaccctcgatcaatggcgcacgctgcaggctgtggtcgaccatggcggcttcgcccaggcggccgaagcactgcaccggtcgcagtcctcggtgagctacaccgtcgcccgcatgcaagaccagcttggcgtaccgctgctgcgcattgacgggcgcaaggcggtactcaccgacgccggtgaagtgctgttgcgccgctcccggcaactggtgaaaaacgccagccagctggaagaccttgcccaccatatggaacagggctgggaagccgaggtgcgcctggtggtggatgcggcttaccccaatgcgcgtctggttcgcgccctcaccgcattcatgccgcaaagccgtggctgccgcgtgcgcctgcgtgaagaggtgttgtcgggcgtagaagagttgctgatggaaggcgtggccgacctggcgatctgcgggttcagcatacccggctacctcggtacggaaatgagcgatgtggagtttgtcgccgtggcgcacccggagcatgcactgcaccgcatgaaccgcgagctgagtttccaggacctggaaagccagatgcaggtggtgatccgcgactccggccgccagcaacctcgcgacgtgggctggctcggcgccgaacagcgctggaccgtcggcagcctggccaccgccgccgcctttgtcggcagcggcctgggctttgcctggttgccccggcacatgatcgagcgcgaacttgccgagggcgtgctcaagcaactgcccctggaacagggcggcagccgccaccccacgttctacctgtattcaaacaaggacaaacccctggggcctgccacgcagatcctcgtggaactgctgcgcacctttgataccgcaccgctggacgcgcctttcgccgccccccggcaagcctgaaacggagttcgcccatggcctggttcgaccatgaaggatgcagcctgcactacgaggaatatggtcacggcgcgccgctggtgctgatccacggcctgggctccagcagtcaggattgggaactgcagattccagtactggcccggcattaccgcctggtcgtggtggacgtgcgcggtcacggccgctcggacaagccgcgcgaacgctacagcatccagggtttcacctatgacctgatcgccttgttcgagcacctgggcctgccaccggcccacgtggtgggcttgtccatgggcggcatgatcgctttccaactggccgtggacgaacccgcactgatcagaagcctgtgcatcgtcaatagcgcccccgaggtcaaggtgcgcagcgctgacgattactggcaatgggccaagcgctggagcctggcacgcttgctgagcctgtccacgatcggcaaggcgttgggcgagcggctcttccccaaaccgcaccaggccgagctgcgccgcaagatggccgaacgctgggcaaagaacgacaaacgtgcttatctcgccagcttcgatgcgattgtgggctggggcgtgcaggaacgactttcgcggatcacctgtccaaccctggtcatcagcgccgaccacgactacacccctgtggcgcagaaacaaaactatgtaaaactgctgcccgatgcgcgactggtggtgatacaagattcccgccatgccacgcccttggaccaacccgaagtctttaacgcaaccttgctcgattttctaaagacagtcgaaaccactacccaggatcactgacccatgctgaaaaaaatcgccttctttgccggttctgttctgttcgccgccaacctgatggccgccgagcccgccaaggcgccccacgttctgatcaccaccaccaacggcgacatcgagatcgaactggacccggtcaaggcgccaatcagcaccaagaacttcctggcctacgtcgacaagggcttctacaccaacacgattttccaccgtgtaattccgggcttcatggtccagggcggcgggttcaccgcgcagatggcgcagaagccgaccgacgcgccaatcaagaacgaagccagcaacggcctgcataacgtgcgtggcaccttgtcgatggcgcgtaccaatgacccgaattcggccaccagccaattcttcatcaacgtcgccgacaatgcgttcctcgacccgggccgcgatgccggttacgccgtgttcgccaaggtggtcaagggcatggacgtggtcgacatcatcgtcaactcccagaccaccaccaagcagggcatgcagaacgtgccaatcgatcctgtcctgatcaagtcggccaagcgcatcgactgatgcctggcaggcagctccgcgcgcagcccacaaggccgcgcgcgcatttgtaaaaggagagcccgcacggcgggcgtcaaactgaatgctctatcgtcgctttgaacaactgatcgacatcttccgcgacgccccgagcgccgccccgcctgataaagtcctgcctttctacctctactacctgcgccaggtttggccgcattttgctgccttgctggtggtgggcctgatcggtgcgctgatcgaagtggcgctgttcagctacctgagtcgcatcatcgatctggcccagggcacgccgccggccaacttctttcagattcacagcaccgagctgatctggatggccgtggtcgccctgctgctgcgcccgatcttcggcgccctgcatgacctgctggtacaccagaccatcagccctggcatgaccagcctgatccgctggcagaaccacagctacgtgctcaagcagagcctgaatttcttccagaatgacttcgccgggcgcattgcccagcgcatcatgcaaaccggcaattccctgcgcgattccgccgtggcagcggtggatgcgatctggcacgtggcgatctacgccatcagttccctggtgctgtttgccgaggccgactggcgcctgatgatcccgctggtgacctggatcctctgctacagcctggcgctgcgctactttgtgccaagggtgaaggagcgctcggtgatttcctccgaggcgcgctccaaattgatgggccgcatcgtcgacggctacaccaacatcaccaccttgaagctgttcgcccatacccgctatgagcaggagtacgccaaggaagcaatcgtcgagcagaccgaaaaaacccagttggccagccgcgtggtcaccagcatggacatcgtgatcaccactatgaacggcctgctgatcgtgaccaccaccggcctggcactgtggctgtggacgcaatcgatgatttccgttggcgcgattgccctggccaccggcctggtgatccgtatcgtcaacatgtccggctggatcatgtgggtggtcaacggcattttcgaaaacatcggccaggtgcaggatggcctgaagaccatcgcccagccgctggccgtgatcgaccgcgacaatgccccgcgcctgagcgtgccccagggccaagtgcgtttcgagcaggtggatttccactacggcaagaagagcgggatcattggcggcctcaaccttgagatcaaggccggtgaaaagatcggcctgatcggcccgtccggtgcgggcaagtcgaccctggtcaacctgctgctgcgcctgtacgacctgcaaggtgggcgcatcctgatcgacggccagaacatcgccgacgtcgcccaggaaagcttgcgcgaacagatcggcatgatcacccaggacacgtcgctgctgcatcgctcgatccgcgacaacctgctctacggtaaacccgatgccaccgacgaagagctctgggccgctgtgcacaaggcgcgcgccgatgagttcatcccattgctgtcggactccgaaggccgcaccgggctggatgcgcatgtgggtgagcgcggagtgaaactctccggcgggcagcgtcaacgtatcgccatcgcccgcgttctgctcaaggatgcgccgatcctgatcatggacgaagccacgtcagcgctggactcggaagtggaagccgcgatccaggaaagcctggaaaccctgatgcaaggcaagaccgtgatcgcgatcgcccaccgtttgtcgaccattgcgcggatggaccgcctggtggtactggagaaaggccagatcgccgagagcggcagccatgccgaactgctggcccatggtgggttgtatgcgcggttgtggcagcaccagaccggcggcttcgtcggtatcgactgacccttacaacccctttccgatccaacctgtgggagggggcttgcccccgatagcggcagatcagtcaccggatacagcgactgatactccgccatcgggggcaagccccctcccacattagagccctggatttgtgccatagccgtgctgtactcagtgcagtgcccagacgggcgctgaagtaaatctgcagggagcatcactgatttacggatccggtagagcgatctatcaaggacgggttgcatgtctttgttcaagcgttcagtcacagaggggttaggtacgttttggctggtgttaggcgggtgcgggagtgcggtattggccgccgcgttccccgcagtcgggatcgggttgttgggcgtgtccctggccttcgggctcacggtgctgaccatggcgttcgccatcgggcatatcagcggttgtcacctcaacccggcagtatcggtggggctggtggtgggcggacggtttccggccagggagttaccggcgtacatcgtcgcgcaggtggtcggtggcacggtcgccgctgcgttgctgtacttcattgccagcggcaagccggggttcgaactggcgtcaggcctggcgtccaacggctatggcgagcactcgcctggcggttattcgatggcggcggggtttgtctgtgagtgggtgatgacggcgatgttcgtgctgatcatcctcggcgccaccgaccgccgtgccccgccaggccttgcaccgatagccatcggtttggcgttgacgctcatccacctgatctctattcccgtgaccaacacctcggtcaacccggcccgtagcacaggcccggcactgatcgtcggcgggtgggcgatccagcaattgtggatgttctggcttgcgccgatcctgggtgcggtgatcggtgggttcacttatcgatggctgggcaaggaggcgccgggttgaggcaaacgggttcagccctgccgataaggcagggctgcccttgcctcctgtgcatacgccacgatccccacccgttcacgctcgagaaaatcctccacggcattcttcaatcccggatggcgcaggtagtgccacgaccgcgtgatcaccggctcgaaccctcggatcaacttgtgctcgccctgtgctcccgcatcgaagcgttgcaggccttgggcgatggcgtagtccataccctggtagaagcaggtttcgaagtgcaaacggtcaaactctgccaggcagccccagtagcggccgtagaagctgtcgccgccgagcaggctgaaggccatcgccaccgggcgcgagccttgcttggccagtaccacgcggatcgcttcaggcatgcgctcggccagcaggctgaaaaaagcgcgagtcaggtagggcgattggcggcgcacggcgtaggtgttggcatagcaggcgtagacaaaatcccactgcgcctcgctcagttcatggccttgcaaccactcgaaatcgatcccctgccccgccacttgctcgcgctccttgcgcatctgtttgcgcttgcgcgaactcaaggcgtcgaggaagtcctggaagtcccggtagcctcggttctgccagtgatactgacagcccaggcgctgtaaccaacccggttgccgggccagtgcagcatcggccaggtcatcggtgaagttgatatgggcgctggaaagcccttcgatctccaggtaacccggcaggctcttgagcagctcaaaaccgtcttcggcactggcggccaatagacgcggaccgctgaccgggctgaaaggcaccgccgtcagcaacttggggtaataatcgatgccggcgcgctcacaggcatcggcccagccgtgatcgaacacgtactcgccataggaatgccatttgcgatagctgggcaacgccgccaccagccgctcaccctcccagtgcagcaaatgctccggctgccagcccgattgcgggcccaggctggcgctgtcttccaaggcgctcaggaacgcgtgccgcacgaacggctgcccctgcggcaccagcgcatcccaggcttgcggggcaatttcggacaggctgtccaggcgttgcagcggcatcggcatcctcactggttcggggcgtgaaagcctggcgagtatcgccgattgccgaccctggcacacccccgtttcgcacgacaaggctctaaaccaatagttccgaacgtgaaaaatttgtcatctagatgacatcacttcgccactgcgccgtcataaacgatcgtgatactgacgcctgtttttagagcgcctggttctacccggcggctatttttccgtccgtcatcggtcggttgtgtcctggatggtttgccatccctcctcactttcggagattgatatgcgtcttgcttccactaaaactgcggcggtcctgtgcggcggcctgttactggccctgagcgttccggccagcgctgcagtcgacgctaaattgctcgacatgctcaaggccaacggccagatcaccgcggcgcagtacaccgaactgcaaagcgagctggccaaagaccagaaagaacagcagatcgcacggcaagctcaacaagagaccaacgaacagatcgcggccaccgcgaagaaaaccaatgagctgagcagcttcgaccagaagctggcctgggccgccaagactcagttcaagggtgacgtacgtttccgtcaggaaaccgtgaaaatccagggcgaatccaacaacggcggccgcgacaaggaccgtcagcgcatccgtgcccgcctgggcgcctacaccgagatcaactcgcaagtcgacaccggtatccgcattgccaccggcagcagcgacgatgcgcgctcgaccaaccaggaccaggacaactatttcgacaagaagtcgatctggctggaccttggctacatcgactaccacccggaccagatcaagaacctgcacgtgatcggcggcaagatgctgcaaccgtgggtgaacatgggcgacgtcatctgggatagcgacatcaaccctgaaggcctggccctgacctacaaatacccgctgggcagcagcgccgagctgttcggcagcctcggtaactacaacctcaaggacaacgtcgacggcgatggcgtgcaattccgccacgacctgcgcctgacctctggccagttgggcacacgcttctcggtcaccgacaacctgaaaatgaccctgggcggcagcatctacgcctaccagaacgacaaggacagccgttgcacaaccaccaccacgccttgcgcactggcggtcaacggtaactcggccgacaaccagttccgcctgtatgaaggctttgcccaagccgacatcggtggcctggctgtaccgctggcgttctacggccagtacgtgaaaaacaacgacgccgtgaccgaccaggacaccgcctggctgatcggcgccaagtcgaaagtgttcggtttcaacctggactacaactaccgcgacatccagcgtaatgccgtggttggcgccttcaccgactcggacttcgccaacggcaccaccggttcgcgcggtcacaagatgaaggtcagctacgacatcgacaagaacttcgccctcggtgccacgtacttcctgaccaaggccgactacgccagccgtacccagcgtgacgccaataccaacaccctgcagctggatgcagaagccaagttctaacagtaagtgttgaaagccttgggccaggacgacccgaggtggctgtaccagtcttgcgtgagtggatcggtccccatcatccgttcgctccacccacgcgagcctgtttattccccgcctttgtgatccttgagccgctcgtcagccagacgctgcgccaaggcctccacaccctctaccggctcatccggcattatcttcagcgtcgcctgcatcaggcgcatctggcggataaaccggcggcagttcgggcagaacatcaagtgatgacgcaccagcagacgctcgcgaaaggtcaactgcccatcgagatagtcactggaacgtgccacttgttctttacaggtcaacattcgcccgtttcctcaaaatgctccaccgtggcgaagactttaagccgtgcccgatgcaacagcacacggacattggagagcgacaacgtcagaagattacagatctcttccaactccaggccctgccgttcgcgcagcaccagcacgctgctttgcaactccgacagactcagcaacgtatgctccaggcatttgcgcagttcatcttcggtgagcagggcttccggggtgtcctggtgccaggcgtagggggcgacggcccaatggccatcgtcaggcgtgaagcgatcatcaccgatggtgccgtggggcgaaggcagatcgtcgagcagcacttcgcgacgattctgcttgtagcgccccttggcagcgttggcggtaatggtcagcagccaggtcttgaggctggaacggccctcgaacctggccaggttgcgcaccaccgacagccaggcgtcctgcaccacttcgtcggcgtggcgctggccgacgatggcataggccaccgcccgcatggcgctctggtaggtggtgaccaattccttgtaggcccgctgctcacccttgagcaggcgttcaagcaggtgcgcgtcgtccgctgctgccattcaagacctcgattgtcttagcgtttgcgcaggatcacgctgccgatcgaatagcccgcgccgaacgaactgagcaccgccacggagcccttgggcaggtcatcctgattcttgtggaacgcaatcaccgaacccgccgagctggtgttggcgtaggtatcgaggatcaccggcgcttcttccaccgtggcttcgcggcccagcagtttcttcacgatcaggtggttcatgctcaggttggcctggtgcagccagaagcgcttcacatcggtcacgttcaactgattctcttccaggtgcacgccgatcagctcggccaccatcgggcatacgtcgcgaaacaccttgcggccttcctgtacgaacagtttgtccggcgcgccgatgccttcttccgcggtgcggttgaggaagccgaagttgttgcggatgttattggagaacttggtcagcagcttggtgctcaccacgtcgaactgatgttcggaggttgccaggtcggcgcgctccaggaccacggcggtggccgcatccccaaagatgaagtggctgtcgcggtcgcggaagttcaggtggccggtgcagacttccgggttgaccatcaggatcgcccgcgcctggcctagctggatgctgttggcggcgttctggatgccgaaggtggccgaggaacaggccacgttcatgtcaaaaccaaacccttcgatgcccaaggcttcctggacttcgatggcgatggccgggtaggcacgctgcaggttggaacaggcgacgatcacgccgtcgatgtcggcagcggttttgcccgcgcgctgtagagcttgttcagcggcgccgacggccatctggcagaggaccgaccattcgtcgttgctgcgctcgggcaggcgtggggccatgcgctgcggatcgagaatgccgtccttgtccatcacgaagcggctcttgatgccggaggccttttcgatgaaggcggcgctggattcggtcagcggctgcacgtcaccgcgctcgatggcggcggcgttgtcgctgttgaactgttgcacgtaagcattgaaagactgcaccagctcttcgttggaaatgctgttggccggggtatacaggccagtgccgctgatgacgacgttatgcacggtcgttcctctaaatctgtcaggcagaagatattggtaccgtcgtaccaaactgtaagtagtccgattccgctccgcggacaccaaactggcatcgctttattccatcgcgccgcagcctttcacgacgatcccggcatttataaccgcgaagtttgccacaaccctcggaatttggcgctatctgtgggagggggcttgcccccgatagcggtgggccagtcaacacatcctttactgacagaccgcaattgggggcaagccccctcccacactggacctgtattgccctggaaaccgtgtagatatcaggcttctaccaggctccactgcttgctcaaacgcttgtcggaaatcggcaccttggtgcccaactgctgggcaaacaacgacacccggtattcctccagccaccagcgatacagctccaactgggggtcgcgcttgccttcctgggcgtgttttttcagacggttttcgtactgcgtccacaggccggccagctcgccgctccacacccgatccttttgcacttggctcggcagtttttccaggcgcaactcgatggccttgaggtaacgcggcaactccttaaaccactgcgccggggtttcccgcacaaaaccggggtacaccaggttgctcagttgctgcttgatgtcgttcaaggccacggcctgggccaggtcgatcttgcctttgaagcgtttttgcaggccatgccagagtttcagcacctccagggtcaggcgcgccaggcgctcggcgtgttcggtccaactgctgcgtttgcgctcggccagggcagccaaaccggcgccatcacgcggcaggttggcttcgccttcgagcacgcaggtgtcgaggcttgcgagcaggatgtcttccaccagcgcatcgatgcggcccaactcgcggtacatcaggcccagttcggtcaggcctggcagtttgccgcgcaggaatttcgccggttccgccagttgctgcatcagcaggcgttgcaaggcgcggcgatgctggaactcagcctcggcagccgtggagaaacgcccctccttgaccgtgccgttgtcttccaccagtgccggatataccgtcatcgacagcccggcgatcttttgttgcgtcttctcggccaccgccgcgaataccttggcctccaccggctgctggctttttgcggtttgcggcacagccaatgcggcctggctggcctcggcaaaacgcgccgtcagttcggcgagatcccggccttcaccaaggaacttgccctggccgtcgaccacttccaggttcatcttcaggtggctttccacctgctgcgcggcctcagcccaggcttcatcgctgacccgcgccccggtcatgcgcaacaattcgcggcccagggcctggggcaatgacccctggccgaactcgatgcgttgcagggcagccttgacgaagtccggcaccggtacaaaattcttgcgcagcgccttgggcaggttgcgcaccagggcgatgcacttggcttcgatcacccccggcaccaaccactccaggcgctccgccggcaaggcgggcaacagcggcgccggcacacgcagggtcacaccgtcacgcgggtggttgggttcgaagtggtaactcaaggccagttccaggtcacccaggtggagggtgtccgggtaatgcgcagcggtgacttcgctggcctcgcgggccagcacgtcttcttcgcgcatgatcaacagttgcgggtctttctggctgttgaccttgtaccagctgtcgaaggtcgcggtctggtggatctccgccggcaggcgcgcatcgtagaaggcgaacagggtttcctcgtccgccaggatgtcgcgccggcgcgccttggcttccaactcgtcgagctgttccagcagttgctggttggcggtgaggcacttggcccgcgactggatctcgccgcgtaccaggccttcacggataaacagctcgcgggacaccaccggatcgaccggcccgtagtgcaccggccggcgcccgaccacaatcagcccgaacagggtgatctgctcaaaggccacgacctggccgcgcttcttctcccaatggggctcgaagtggtttttcttgatcaggtgcccggccagcggttcgatccagtcggcgtcgatcttggcgaccatgcgcgcatacagcttggtggtttccaccagttcagcggtcatcagccattgcgggcgtttcttgccgatgcccgacgaggggtgaatccagaaacgccgctgacgtgcgcccaggtaatcgccgtcctcggttttctgaccgatctggctgagcaaaccggacagcaccgccttgtgcagtttcgggaagtccgccggctctttattgacgctcaactgcatgtcgcggcagatcaggctcaactggcgatgggaatcacgccattcgcgcaggcgcaggtagttgaggaagttcttgcggcaccagttacgcagtgggctggcagtcagttcctgacgttgctcttcaaaaccgcgccacaaattgaccaggccggcgaagtccgaatccgggtccttccactgtgcgtgggcctggtcggcggcctgctgacgctccggtgggcgctcgcgcgggtcctggatcgacatggcgctggcgacgatcagcacttcctgcaagctgcccagcttggcggcttcgagcaacatgcggcccatgcgcgggtccaccggcaggcgcgccagctggcggcccagcggggtgagctggctgttgcggtcgaccgccgacagctcttgcagcaggttgaaaccatcgctgatggctttgccgtccggcggttcgataaacgggaaatcggtgatttcgccgagacgcaaatgcagcatctgcaggatcacagcggcgaggttggtgcgcagaatttccgggtcggtaaattccgggcgtccgataaaatcttcttcgctgtacaaacgaatgcagatgcccggctcgacccgaccgcaacggcctttacgctggttggcgctggcctgggaaatcgcctcgatcggcaggcgctgcaccttggcgcggtagctgtagcggctgatgcgcgcagtgccgctgtcgatcacataacgaatgcccggcacggtcagcgaggtttccgcgacgttggtcgccagcaccacgcgccggcccggatgggactggaagatgcgctgctgttcggccggcgacaggcgcgcgtacaacggcaggatctcggtgtgcttgagctgggccttgcgcaacatgtcggcagcgtcacgaatctcgcgctcccccggcaggaacaccagcacgtcgccggggctgcgccgctcgctgcgctcataggcggcgatttcatcgagggcggcgaggatcgcctggtcgacggtgaggtcgtcctcgacgcggttgccttcctcgtcctgctccagggtcagcgggcggtaccaggtgtctaccgggaaggtacggcccgagacctcgactatcggcgcatcgtcgaaatgcttggagaagcgctccaagtcgatggtcgccgaggtgatgatgaccttgaggtccgggcgacgtggcagcagggttttcaggtagcccagcaggaagtcgatgttcaggctgcgttcgtgggcctcgtcgacgatgatggtgtcgtagcgctccaggtagcgatcgttctgggtttccgccagcaggatgccgtcggtcatcagcttgatcagggtgttggaatcgctctggtcttcaaagcgcacctgatagccgaccagcgcgcccaatggcgtggccaactcttcggcgacccggctggccacgctgcgtgcggcgatccggcggggctgggtatgaccaatcagaccgaactggccgcgaccgatttccaggcagatcttcggcaactgggtggtcttgcccgagccggtttcgccggcaatgatcagcacctgatgcttgttcagcgcctctttgatttcatcgcgcttggccgcgatcggcaggctgtcgtcataacgaatcaccggcaggctggcgcgccgcgccgtgacctgggcgcaggacgcctgcatgcgcgcgacccactgcgccagcttctcctcgtcgggcttcttgcgcagctcaagcagctggcgccgcaagcggtggcggtcggcgagcatggcgtgatcgagggttttgagcagttggtcgatagtgggcgcttggtcagtcatcaggtacgcaagggtcgtctatttatgcagggggcggattgtcgcagaaaaccgcccccaagcgtgccccctcattcgttatcgcggtccttacgccggtacgggaatacatcgatcaccttgcccgcccggatcgcctcctgcagccccttccaataatcggcgttgtacaactcgccgtgcagctcgtcgaagagcttgcgctggccggcatcggcgaacaggaacggtgggaattcttcggggaagacgtccaacgggccgatggaataccagggctcggaggccatttcatcctccggggtacgcggcgccgggatgtgccggaagttggcctcggtgagaaaacagatttcatcgtagtcgtagaacaccacgcggccatggcgggtgacgccgaagttcttcagcagcatatcgccgggaaaaatgttcgccgccgccagttgcttgatcgccaagccatagtcttccagggcctcgcgcacctgggcggggttggcgttgtcgaggtagaggttgagcggggtcatgcgccgttcggtccagcagtggcggatcagtacggtatcgccttcgacttcgacggtgcccgcagccacttccaatagctcggccaggcactcaggttcgaatttgctcagggggaaacggaagtcggcgaactcttgggtatcggccatgcgcccgacccggtcgacgcttttgaccaggcggtacttctcgatcaccgtggcgcggttgatgtttttcgacggtgaaaaacggtccttgatgatcttgaacacggtgttgaagcccggcagcgtgaacacgctcatgaccatgccgcgcacgccgggggccatgatgaattgatcgtcggtggtcgccaggtggttgatcagggcgcgatagaactccgacttgccgtgcttgtagaaaccgatggaggtgtacaactcggcgatgtgcttgccgggcaggatgcgtttgagaaagccgatgaattccgccggcaccggtacatcgaccatgaagtaggagcgggtgaacgagaagatgatcgatacatcggcttcgtcggtgatcagcgcatcgatctggataccttgcccttcgcggtgcagcaacgggatcaccagcggccattgttcgtcgcgggtgtagatgcgcccgacgaggtaggcacctttattacggtagagcaccgaggaaaacagctcgaccttgaggtccgggtccttgcacacccagtccggcaggttttcccgcagttgggtttcgaggcgttgaaggtcgcctgcgaggtcggcgtagggttcgctgaagcggtagtcggcaaagatctgcgcgagcatttccgggattttcgcggcgggggtgtaggtgcgcgtctgcgcggcccgtgcccgacgcaggctaggccgggtggtgtggatgaacatacagccgtcgctgatcaggtcgtggctgaacagcccgcagaagatcgagttgtaccaggtctcggagagttcatcgtcaaagcgccggtcgatcaggccgatgtaggcacttttgaccaagggccacgcatcgatgtcgagcagggcggcgtcatcgaagcgctcacgcaaccgctgggtcacctcagtgaccttttcctcatagagattgatccgcgccgccgacgccgcctggccctgctgccactgggccttttcgaaacgctcgcgggcgccatcggtgatctggcggaagtgttcgcggtaatcgtcgaagccatcaaggatcatctgggcaatggcgagggcggattgcgacatgcgggaaacctcgagcgggcatcgggaagccctgagcttagccagtgtacgaacacaggagaagggtcatttttcgtgcagccttgtacaactccgttcatttcgtacatttattttcaatttatttaattcgaccaattggtcaataaacgcactgaaaagtcgcacattgttttccccatacgcccacaacgacgcggctttgctgcttagcgccggaaacacgtgtactcccccggggactctgctccgcatacatctttggatccaactaagggaaaccctgattaccaccttgatggcactttgatatatagcgcgccctctcccaccctaacaaggtccgaagaccgatccgggaacaggttctaatcgcccaaggagcatagagatgtcattgaggaacatgaggatcggtctgcgtgccagtctgagttttggggttttggccagcttgctggtgattgtgggcctgttcggcctgggccagatggccaagctgcgacagagcgcgctggtcatcgaacaatcgtggatgccgagcatcgagaacatccacgacagcgcggcctttgtcgccagcatccgcctggaggccttgcgcctggcgaccaccgacgaatcgcggatccgcgacaacagcaaagccctgatcactcgccagcgcagcgagctgcaaaccctgctcgaccatcacaaaagcctgctcagcagcgacgaagaacgccagatgctcaagcaactcgaagggaacgtgaacacttacctggccctcgtcgaacagatcgtcaccctggtggacaaggatcagcagcaagacgccattgacctgctcaacagccggctcgctccgcagggtgtgatcctcaacaagagcctggaggacatgatcgtgttcaaccagaacggcgtggaaacggcggtggattcagccgcacagacctattccagtgcacagtggatcgtcggcctgatcatcgtattcgccttgatcgccaccttgttgctcgcctggctgctgacccgcagcatcaccgccccgctcggccaggcgctgagcgtggcccgcaccattgccggcggcgacctgagccagccgattgccgtcagcggcaaggacgaaccggcccaattgctcaacgccctggcgaccatgcaggcgcagttgcagggcaccattcgcggcatcagcgaatcggcgcaacagctggcctccgccgccgaagagatgagctcagtgatggagcaaagcacccgtggcctgcaggcgcagaacgacgaaatcgaacaggccgccaccgcagtcaccgaaatgagcgcggccgtggacgaagtggcgggcaatgcggtgtccagcgccgaggcgtcccaggcctccgacgaggacagcaagcacggccactaccagatcagcgaaaccatcagctcgatccagaacctggtcgacgaagtgcttggcgcctcgaacaaggccgaaggcctggcagtgcaggcccaggacatcagcaaggtgctggaagtgatccgcggcatcgccgggcagaccaacctgctggcgctcaacgccgccatcgaagcggcccgcgcaggcgaggccgggcgggggtttgcggtggtggccgatgaagtgcgctccctggcgcaacgcacccaggactccaccgaagaaatcgagcagatgatcaccggcatccagcgcggcacccaggatacggtcgacgcgctgaacagcagcgccgagcacgcgggccagaccctgcagcgggccaacagcgccggcagtgccctggaaaaaatcaccgcggccatctcgcagatcagccagcgcaacctggtgatcgccagcgccgccgagcagcaggcgctggtggcacgcgacgtggaccgcagcctggtgaacatccgcgacctgtccacccagaccgccgccggtgccacccagacctcggccgccagccaggaactgtcgcgcctggcggtggacctgaatgcgctggtgacgcggtttgtcctgtaatcattagacatgtcatgcaacactcgcggccttattgaggtaggagtgttccgtgagacctgtcgacaccttgtacttgctgggactcgccgccatctggggcgcgagcttcctgttcatgcgcattatcgcgccggagatcggcacgctgccgaccgcatttttccgcgtgtcgatcgccgccgccgggttgctggtgatcctggcggtgatgcgggtgagctgggacttccaaggcaagttcaagactgtattgctgctcggcgtgatcaactccgggatcccggcgaccatgtattcagtcgccgcccaggtgctgccggcgggttactcggcgatcttcaacgccaccacgccgttgatgggtgtgctgatcggcgggctgtttttcagcgaacgtctgaccccgtcgaaagtcgccggggtgtgcctgggcctgctgggcgtgggggtactgacccgcgccgggccggtggcgtttgacctgcaattgctgatgggcgcgctggcgtgtttgctggcgaccacctgttacggctttgccgggttcctggcaaggcgctggctggatcagcgtggtggcttggacagccgcctgtcggccctgggcagcatgctcggcgcgacgttgttcctgttgccgttctttgcctacagcgccatcagccaaccgccggcgagttggggtggatggcaggtgtgggggtcgttgctggggttggggctggtgtgtacggcgtttgcctacattctttacttccggttgctgacgtccatcgggccggttaagtcgatgacggtgacgttcatgattccgccgtttggggtgttgtggggggcgttgttgctgggggagccgttgtcgatggcgcacctgtatggcggggtgttgattgcgggggcgttgtggttggtgttgcggccgcgaaaattgtaggagcccggcttgccggctcctacagtgcggtgtcaacgcttacggaagacaaacaccaaaccgatgatgatcaaccccatccccaacaggctcaacatcgcgagcttgttgccgaagatcagatagtccatcaccgccgtcaccgccggcaccagatagaacagactggtgacattcaccaggttgccccgggcgatcaggcggtacagcaacagcgtggccagcaacgacaccaccaagcccatccacagtaccggcaggtagaagctgccgctgtgttcaaaatgaaacggctggaacggcacaaacaccgaacacagcagcaaccccgccaggtattggaccggcaacgtgcccaaggggttgtcggtgatgcgtttctgcatgatcgagccgaaggtcatgctggccagggccaacaacccaaacagcatccccgccaaagacatgccggacaaaccgatgccctggtagaccaccatgatcagccccgccaaccccagcgccaggccaaacaaccgactcaacgaacgctgacgttccatcaacaccacggtaaggatcggctgcacgcccatgatggtcgccatcatgccgggggtgactttcaggtccagggccagcagatagaaaatctggtatgcccccagcagtaccaacccggttgccgccgcgtacagcatgggcttgccggggcgcggcagtttcaacttgaggatcggtatcagcaccaccaggcccacgagggcgatggcaaaacggattaacagaaacgcaaagggtgacgcgtgggccagcccccatttggagaagatcgccccgctgctccacagcaatacaaacaggctcgtcgaggccgccgcggccacggattgtttcgaaagaacagacatggttaccacctgtcatcaggcaaaaaaagccgattcagcagacgctgaaatgcattaggtttttttcaggcgggcagacgggaacagcaatcagctgatcagcccaaaatgccaacacccggcggtgatacgactgcgtacaccggcgtgctactgacaggtggggggtagtgactgatctgcgcaggctgcttgttcgcgcacggcacgaccacagcgttgaccgctgaatcgactaccgctgtgcgctggagagctggcatgggctgatcttgtgtgaagggatgaagaagctcggactataaccacccggtgatacgttttgcaatcggcatgaatggaggagttttcatgtggggcctgcaggaccggtcgctataatgccgcccagcattttccaaggagttcccatgttcgcattgccctggctgtacctggcgcttctttccatcggctatctgctggcgttgatatacgggcaactgggggtgttggcagccgtgtccgtcgccctgctgctgatcgctggctacgcggtacgccagcaacgcacgcactgggcgcgttacctgggccacgggctgttcatcgtgttggcgctgagcctggcgatgcactggttgccgggcttctacaacgggaggggcattgcctcgcaccgcttcaccgaggatgccgtgcccttctcgatgtatttgaaccaggacaaacctctgatcggcttctggctgttgctggcctgcccatggattgtggcacggcgctcgttgcgcttgtcgatctgcgtggccgccctggcattgaccctcaccgccatctccgccctcggcggagcggccttgctgggcgtgatcagttgggcaccgaagtggccggaacaagcctggctgtgggtactcaataacctgttgctggtgacgctggtggaagaagccttgttccgcggttatgtgcagggcggcttgagccgacgtttcaaacacctgccttacggcgagaacctggcgctgctgctggcctcgctgctgttcggcctggtgcacatcggcgcaggctggcattgggtattgctggcgagcatcgccggggtgggttacggcctggcctatcgttttggcggcctgggcgcggcggtggccacgcactttggcttgaatctgcttcacttcgggttgtttacctacccgatgctggccggttgatcccctgcaggggaacgtgcgtaccgccgattgttgcaaaaattaagttaaataaaccgccgttcctgccgataccccctgaaagccttgcggattgaacaatcatgcgtaataaccaacccgttacccagcgcgaacgtaccttccccgctcagcaacggttgatctccaccacagatgccaaaggcgtgatcacctactgcaacgacgccttcgtcgaaatcagtgggttctctcgcgacgaactggtgcgtgccccgcacaacctggtgcgtcacccggacgttccggcggcggtgttcgcgcacatgtggtcaacgctcaaacaaggcttgccatggatgggcattgtcaagaatcgctgcaagaccggtgaccattactgggttaacgcctatgtgacgccggttttcgaaggcaaccaggtggtcggctacgaatcggtgcgcatcaagcccaccgccgagcagatccgccgggccgaagcgctctaccaacgcatcaaccagggcaagtcggcgatcccccagcgggacaagtggctaccggtgttgcaggactggctaccgtttatcctggtgagccagttgagtttcatgatcggcgcgtccctcaactcccactggggctttgccctggcggcggggttgtcggtgccgttgggcctgctcggcctgagctggcaacagcgcggcctcaagcgtttgctgcgcctggccgagcagaccacctccgacccgctgatcgcgcagatgtacaccgacagccgtggcgcccaggcgcgtctggagatgtctatcctcagtcaggaggcacgtctgaagacgtgtcttacccgcctgcaggacactgccgagcacctcaacgaccaggccgcgcagtccaacaccctggcgcataacagctccagcggcctggaacgccagcgcgtcgagactgagcaggtggcgaccgccgttaaccagatggcggccaccacccaggaagtcgccagccatgtgcagcgcacagcggacgcaacccaggaagccaaccgcctcaccggccgtggccgcgacatcgccggggaaacccgcgaggcgattcagcgtctgtccgtagcagtgggtgagaccggtgtgaccgttacccagttggccaaggacagcgatgaaatcggcggcgtggtcgacgtgatcaagggcattgccgaccagaccaacctgctggcgctcaacgccgccattgaagcggcgcgtgccggtgaaatgggccggggttttgcggtggttgccgacgaagtccgccaattggctcagcgcacagccgagtcgaccgggcagatccatgccctgatcgccaagctgcaacaaaccgccgccgctgccgtacagaccatggacgccgggcatcgccaggccgaagaaggcgtggcacgggtgatggaggcggatcaggcgctggtagggatcagtgaggcggtggcgcatatcaccgacatgactacccagatcgcggctgccaccgaagagcaaagctcggtggccgaagagatcagtcgcaacatcagcaccattgcgctgttggcggaccagacctcggagcaagcgtcgaactcggcgcagttgagtgaagaattgacgcatacggcgaatacccagtattcgttggtggagcgcttcaaccgatagaccgttatcggggcggtgcgacgattcgacaacccccctcccacactttgactgtattcacaaatcaaaatgtgggagggggcttgcccccgatagggccctagaggacgccgagaaacctggccaccttcaccgccgccgcctccaaatgctgctcatgactaaaccccgacgccttcaacggcttcaagtcatgatcccccgccaccagccacatcacctcgatgctcggcgacaattcatacccctcaaccgccgcccgattacccagcgcatcgcgctcgccctgcacaatcaaggttggcgtcttcaaccccgccaaatgctcaacccgtggtttctccggcttgcccaccgcgtagaacggataccccaggcacaccagcccatcggcgcccagttgatcggccaacaaactggccatgcgcccgcccatggacttgccaccaatggccagtttcccagcgacatgacgtcgcacctcggcatgcaccccgcgccaggcttccagcagtttcggcgcagggtttggcgggcgcttgccgccatccacccggcgctgggccatgtagggaaactcaaagcgcaacacgttgacgccatgcccggcaaggcctgcagccatatcgttcatgaaggatgagtccatcggtgcgccagcgccgtgggccaggatcagcgtgacgggatcgctcgaaagcgcctccaccgcgacatcccacaaccacccatgttcccgcacacactgcgcccattgatccccgtcaatactggccttgtgctctttgcccatgcttgcctcgctttttagtctgcctataactccagcccaagtgccgcatttgcttgggttgaaccgtggatggggaaccatgaacactactttaagtaccgcctataactacaaggtggtccgccaattcaccattatgacggtggtgtggggcatcgtcggcatggggctcggggtttttctcgcggcccaattggtgtggcctgcactcaacttcgacttgccgtggaccagcttcggccgcctgcgcccgctgcacaccaacgcggtgatcttcgccttcggtggctgcgcgctgttcgccagctccttctactcggtgcagcgtacctgccagacccaattgttcgcgccgaaaatcgccgcgttctgcttctggggctggcagttggtcatcctgctggcagcgatctccttgccgctgggctacaccagctccaaggaatacgccgagctggaatggccgatcgatattctgatcaccattgtctgggtggcctacgccattgtgttctttggcaccgtggccaagcgcaacaccaagcacatctacgtcggtaactggttcttcggtgcgttcatcatcaccgtggccatcctgcatatcgtcaacaacctggaaatcccggtcagcctgaccaagtcctactccctctatggcggtgcgacggatgccatggtgcagtggtggtacgggcacaacgcggtaggctttttcctcaccgccggtttcctcggcatgatgtattacttcgtgcccaagcaggccgagcgtccggtgtattcctatcgcttgtccatcgtgcacttctgggcgctgatcaccctgtacatctgggcaggcccgcaccacttgcactacaccgcactgccggactgggcacagtccctgggcatggtgatgtcgctggtgctgctggcaccgagctggggcggcatgatcaacggcatgatgaccctgtcgggcgcctggcataagttgcgcagcgacccgatcctgcgcttcctggtggtgtccctggcgttctacggcatgtcgaccttcgaaggcccgatgatggcgatcaagaccgtcaacgccctctcccactacaccgactggaccatcggccacgtacacgccggcgcactcggttgggtggcgatgatctccatcggcgcgctgtaccacatgatcccgaaagtctttggccgcgagcagatgtacagcctcggcctgatcaacgcgcacttctggctggccaccatcggcaccgtactctacatcgcttcgatgtgggtcaacggcatcgcccagggcctgatgtggcgtgcggtcaacgaagacggcaccttgacctactccttcgtcgaaaccctggtggccagccaccctggcttcatcgtgcggctggtgggcggtgcgatcttcctcagcggcatgttcctgatggcttacaacacctggcgcaccgtgcgttcggcgcagcctgtcgaagccgccaccactgcgcagttggcctgaggagtctgtgatgaaacacgaaacgattgaaaagaacgtcggcctgctgatgctgctcatggtgctcgccgtgagcatcggcggcctgacccagatcgtcccgctgttcttccaggacgtgaccaacaagccggtggagggcatgaaaccctacaccgcgctgcaactggaaggccgcgacatctacatccgcgaaggctgcgtacagtgccactcgcagatgatccgcccgttccgtgccgaaaccgaacgctacggccactactcggtcgccggtgaaagcgtgtgggaccacccgttcctgtggggctccaagcgcaccggtccggacctggcgcgcgtcggcgcacgctactcggacgactggcaccgcgcgcacctgtacaacccgcgcaacgtggtgcccgagtcgaaaatgccggcctatccatggttggtcaccgccgccgtcgacagcagccacaccgagaccaagttgaaagtgatgcgcaccctcggcgtgccgtacaccgacgacgacatcagtggcgccgtggccagcctcaagggcaagaccgagatggacgcgctggtttcgtacctgcaagtgctcggcactgccatcaagagcaagaggtgagccatgggatttgaattcgatgcaggcaccatccgcggcctcggcacgctggtggtcgccatcgcctttatcggcctgtcgctgtgggtgttcaacaaccggcgcaatgcggaattcgagcaggcgcgcctgctgcccttcgccgatgaaccttctccatccgacgctcaagaagagcctgcaataaggagcacccggccatgaccctattctggagtacatggatctgcgtactgaccctcggcagcctgatcggcttgacctggctgctggtcggcacccgcaagggcgagaccaagggcagcgtcgaccagaccatgggccacgccttcgacggtatcgaggaatacgacaacccgctgccccagtggtggttcatgctgttcgccggcaccctggtgtttgcggtcggctacctgatcctctacccgggcctgggcaactggaaaggcgtgttgccgggctatgaagacggctggacccaggccaaggaatgggacaaggaaatggccaaggccgacgccaagttcgggccgatcttcgccaaattctcggccatgcccgtggaagaagtcgccaaagacccgcaagcgctgaaaatgggcggtcgcctgtttgcctccaactgtgcggtgtgccacggctcggacgccaagggcgcgtttggtttcccgaacctggcggacaacatctggcgctggggcggttcggccgaggcgatcaagaccaccatcctcaacggccgccacgcggcgatgccggcctggggtgacatgctcggcgatgaaggtgtgaaaaacgttgccgcctatgtgcgccacgacctggccaagctgcctctgcccgccgacagcagcgccgatgtggctgccggccaagcggccttcaacaccacctgtgtcgcctgccacggtccggaaggccatggcatggaagccatgggcgcgcctgacctgaccaaaccggccggctacatctacggcaccagccttgcgcagttgcaacagaccatccgccacggccgccaaggccagatgccggcgcaggaagtgctgcaaggcaatgacaaggtgcatctgctggcggcctatgtttacagcctgtcccacaacgctgatggcgcaacgccagaaagccaagcgcaataaccgctgatcgccgccccattttggggcggcaaccctggtgctgtacgcgaccaagtgtcacacccttccaaagcacaactttcccctcctcactttcgggtctacgcttgttcccacagcggaccaatcctggcgtacgcgacgacattcgttgcgacccctgaattttcctgtccactcgatcagctttcgatttccgattttgtccttacaccaaacatggaaagggcgcagaatctggcgtggaacgcattgatacaggtcagtcattgcgttgcaatgacccctcgctttctacatacttgcggccgattttacctataaaaaaacctaaaccgtggaaccttagaatgagcacagcaatcagtccgactgcttataactataaggtagtccgccagttcgccatcatgacggtggtctgggggatccttggcatggggctcggggtgttcatcgcctcgcaactggtctggccggaattgaatttcggtttgccatggacgacctttggccgcctgcgcccgctgcacaccaacctggtgatcttcgccttcggcggatgtgcattgtttgccacctcctactatgtcgtgcagcgaacctgccagacgcgactgatctccgacagccttgcggccttcaccttctggggttggcaagcggtcatcgtcggcgccatcgtcaccctgccgctgggctacaccaccaccaaggaatacgccgagctggaatggcccattgccattttgctcgccatcgtgtgggtgacctatgccgtggtgttcttcggcaccatcgtcaagcgcaagaccaagcatatctacgtgggtaactggttctacggcgcgttcatcctggtgacagcgatgctgcacatcgtcaaccacgcctcgttgccggtgagcctgttcaagtcctactcggcctacgccggggccaccgatgcgatgatccagtggtggtacggccacaacgccgtgggtttcttcctgaccaccggtttcctggggatgatgtactacttcgtgccgaaacaggccgaacgtcctatttactcgtatcgcctgtccatcgtgcacttctgggcgctgatcaccctgtacatctgggcaggtccccaccacttgcactacaccgcattgccggactgggcccagtccctgggcatggcgatgtcgatcatcctgctggccccgagctggggcggcatgatcaacggcatgatgaccctgtcgggcgcctggcataaattgcgcaccgacccgatcctgcgcttcctcgtggtgtcgctggcgttctacggcatgtcgaccttcgaagggccgatgatggcgatcaagaccgtcaactcgctgtcccactacaccgactggaccatcggccacgtacacgccggcgccctcggctgggtggcgatgatctccatcggcgcgctgtaccacatgatccccaaactgttcggtcgcccgcaaatgcacagcgtcggcctgatcaatgcgcacttctggctggccaccatcggcaccgtgctctacatcgcctcgatgtgggtcaacggcatcacccagggcctgatgtggcgtgcgatcaacgatgacggcaccctcacctactccttcgtcgaagcactgcaagccagccatccgggttacatcgtgcgcgccctgggcggtgcattctttgcctccggcatgttcctgatggcctacaacgtctggcgcaccgtgcgtgccgccgaccctgtagaagccgaagccgccgccaagatcgccgttgtgggagctcactgatgaagcatgaagtagtcgagaagaatatcggcctgctggccttcttcatggtcatcgccgtgagcatcggcggcctgacccagatcgttccgctgtttttccaggacgtgaccaacaagccggtggaaggcatgaagccgcgcaccgcccttgaactggaaggccgcgacgtctacatcgccaacggttgtgtcggctgccactcgcagatgattcgcccgttccgtgctgaaaccgaacgctacggccactactcggtcgccggcgaaagcgtatgggaccacccgttcctgtggggttccaagcgcaccggcccggacctggcccgtgtcggcgggcgttactccgatgactggcagcgtgcgcacttgtacaacccgcgcaacgtggtgcctgagtcgaaaatgccggcgtacccgttcctcgtggaaaacaagctcgacggcaaggacaccgcgaagaagatggaagtcctgcgcaccctgggcgtgccctataccgacgaagacatcgccggtgcagccgccgccgtgaagggcaagaccgaaatggacgcactggtggcctacctacaaggcctgggcaccatcatcaaaagcaaacggtgatctatggatatcgggatgattcgtggcctgggcaccgttgtggtgatggtggcctttatcggcctggcgttgtgggtgttcagccccaagcgcaagtcggagtttgaagacgcgaccttgctgccctttgcggatgatcccgaagccatcaagcacgtcgagcaagcttctaggagtaacaaagaatgactacgttctggagtctgtacgtcacagtcctcagtctgggtaccatcttcgccctgacctggctgctgctgtcgacccgcaagggccagcgcgccgagcaaaccgacgaaaccgtcggccactcgttcgacggcatcgaggagtacgacaacccgctgcccaagtggtggttcatgctgttcgtcggcaccatcgtcttcgccctcggctacctggcgctgtaccccggcctgggcaactggaagggcctgctgccgggctacaactacctcgacaccgacaagcaaacccccttcgccaacggccagaccggctggaccggcgtgcacgaatgggaaaaggaaatggccaggtcggacgccaagttcgggccgatcttcgccaaattcgcgtcgatgccgattgaagaagtggccaaggacccgcaagccctgaagatgggtggccgcctgttcgcctccaactgctcggtgtgccacggttccgacgccaagggcgcctatggcttccccaacctgaccgacgcagactggcgctggggcggcgagccggccaccatcaaggaaaccatcatgaagggtcgccatgcggtgatgccggcgtggttggatatcctcaaggaacaaggcgtcagcgatgtggccgcgttcgtgctcaccaacctcgacgggcgcaaactgcccgaaggcgtgaaagccgatgtggccaacggcgagaaactcttcgccgccaactgcgtggcctgccacggcccggccggtaaaggcaccgccgccatgggcgcgcccgacctgactcacccgggtgcattcatctacggctcgagcttcgcccagctgcagcagaccatccgttggggccgccagggccagatgcctgcgcaggagcaactgcaaggcaatgacaaggtgcacttgctggcggcgtatgtgtacagcttgtcccatggagataagaaggctgaagagcagtaactcctcgaaagaacaaagccccgtgcagcgtaagctggcggggctttgttctttctggctcccagggttatccaagcaggaacccactaccacttgatacttgcggctcggagcaaccaagtagtaacgtaactacattcagcctgacaaaggggggagcaccccatgaccatcacgactatttccagccgcgaattcaaccaagacacaagtggcgccaaaaaagccgcccgccaggggccggtttttatcaccgatcgcggcaagcccgcccatgtactgctaagcattgaggagtaccagaaactgacagggctcaaggccgacatcgttgatctgctagtgatgccggaagcggccgatatcgacttcgaaaccgagcgagccgtgatcactcatcgacctgtggacctctcttgatgtatctactcgacaccaacgttatttctgaactgcgcaaaccccaggctgatgcaaaagtggtcgcctgggccaaaagtgtcatcgctacacgcatgtttatttccgcgatcacattgaaagaattggagaccggggtgttacgtattgagcgccgagacccggcacaaggaaagctgctaagaacctggctcaagcgccatgtaatgcccgcttttgattccaggatcctgccggtggataccgcggtcgcgctgcgttgtgcccatctgcatgtgcctgaccgggcaaatgaaagcgatgcgctgatcgccgctaccgctctggtccacgggctcaccgtggtcacacgcaatatcaatgacttcaaatccagcggggttccgttgatcaatccatgggacgaatgaccacaatacctaccaaaaccgtccatacttcccaagtcaattgatccagatcacgtacaccatcaattgatttcccccaacgcgaccaaaggtcgcaccctttgcacatcctcgggggcgtatcattaggccactgcaacaccctacatttgaccccggttggcacgtactggccgaggcaaatctccaccgccgtgggatgcaatgatgagcaaccagataccggtacatgacgttaccccgcctgccaaaaccgtcgacctctacgcctcgcgagagaaaatctacacgcgcgccttcaccggcctgttccgcaatctacgcatgctcggcggtgccggcctgttcctgctctacttcggcacggtgtggctgaactggggtggccaccaggccgtgtggtggaacctgcctgagcgtaagttctttatttttggcgcaaccttctggccccaggacttcatcctgctctcgggcatcctgatcgtcgcagcgtttggcctgttctttatcacggtgtacgccggtcgcgtgtggtgcggctacacctgcccgcaaagcgtgtggacgtggatcttcatgtggtgcgaaaaggtcaccgaaggcgaccgcaaccaacgcatcaagctcgacaaggcaccgatgggcgccaacaaattcctgcgcaaattcagcaagcacacgctgtggctgctgatcggatttgtcaccggcatgacctttgtcggctacttctcgccgatccgcgaactggtgttcgacttcttcaccggccaggccgatggctggtcgtatttctgggtcggtttcttcaccctcgccacctacggcaacgccggctggctgcgcgaacaggtgtgcatctacatgtgcccgtatgcgcgcttccagagcgtgatgttcgacaaggacaccctgatcgtttcctacgacccacgccgtggcgagctacgcggcccgcgtaaaaaaggcaccgactacaaggcccagggcctgggcgattgcatcgattgcacgatgtgcgtgcaagtgtgcccgaccggtatcgacatccgcgacggcctgcagatcgagtgcatcggctgcgccgcctgcatcgacgcctgtgacaacatcatggacaaaatggactacccgcgcggcctgatcagctacaccaccgagcacaacctgtcggggcagaaaacccacaagctgcgcccgcgcctgatcggctacgccctggtactgctggcgatgatcagcctgctggtggcggcgttcttcatgcgctcgctggtgggtttcgacgtgagcaaggaccgcgtgctgtaccgcgaaaacgccgaaggccgcatcgagaacgtctacagcctgaagatcatgaacaaggaccagcgcgaccacacctacgtgctcgacgccgccggcctgcccgacctcaagctgcaaggccggcgcgagatcaaggtggcggccggcgatatcgtcagcatgccggtggagctgtcgagtgcgccggaacagttgccgtcgagcaccaacgaggtgaaattcatcctcaccgatgccgatgacgccagcgtccatattgaagccaagagccgattcatcggcccacaagtccgctaacagggaaccgaacaatgtccgtagcaactgccgcaagcccttggtacaagcacctctggccctggatcatcattggcatcctggcctgttcggtgaccttgaccctgtcaatggtgaccatcgcggtgaacaacccggacaacctggtcaacgacaactactacgaggccggcaaaggcatcaaccgctccctcgaccgcgagctgctcgcgcagaccctgcaactgcgcgccaaggtgcacctggatgagctgaccggtgaagtcgaggtcaaccttaccggctacagcaacccgaaaaccctggagctgaacctgatttccccgacccagccggagaaggaccgcaagatcaacctggcccgcagtgacagcgagcccggacgctatatcggccaggtcaccgacaaggtcgaaggccggcgtttcgtcgagttgctcggcgtggaaggcgaccggacctggcgcatgttcgaggaagaacaagtcagccacgacaaggacttgctgctgggtgatgaaccgttgcagggtgccgaagacctgaaaaaataaaaagcctgcgcttcgcgcatcgggggcaagccccctcccacactggattgggtttacacatatctattggtgaaatcagtcaaatgtgggagggggcttgcccccgatgaggccctaccagccaccatagattcccaagccatgaccaccccctgctaccactgcgccctccccgtcccctccggtagccgtttcaccacggtcatcctcggtgagcgccgcgaactctgctgtcccggctgccaggccgtggccgaagccatcgtggccggtggcctggaaagttattaccaacaccgcagcgaagcctcggccaaccccgaggcgttgccggtacaactggtggatgagctggcgctgtatgaccgcgccgacgtgcagaaaccttttgtgcgccacgaaggcgaactcgccgaagtcaccctattgatggaaggcatcagttgcgccgcctgcggctggctgatcgagaaacacctgcgcagcctgcccgccgtggccgaggcgcggttgaacctgtccaaccaccgcctgcacgtgcgttgggccgatgggcaactgccgctgagccaactgctcggtgaactgcgccatatcggctacgccgctcacccctatcaggcggatcgcgccgccgagcaactggccggcgaaaaccgcctggccctgcgccaactgggcgtggccgggctgctgtggttccaggcgatgatggcaaccatggccacctggccggaattcaacatcgacctgagccccgagctgcatgtgatcctgcgctgggtggcgatgtttcttacaacacccatcgtgttctacagctgtacaccgtttttcaagggcgccttgcgcgacttgcgcacgcgccacctgaccatggatgtctcagtatccctggccatcggcggggcttacctggcgggcatctggaccgccatcaccggcacgggcgagttgtacttcgatgcggtgggcatgtttgcgttgttcctgctggccggtcgctacctggagcgccgcgccagggagcgcacggccgccgcgacggcgcaactggtgaacctgctgcccgcctcgtgcctgcgactcaagcccgacggccagagcgagcgcatcctgctccccgaacttaccctgggcgaccgcgtgctggtgcaccccggtgccgtgctgccggcggatggcgtgattctcgatggacaatcgagcattgatgaatccctgctcaccggtgagtacctgccgcaaccgcgccagaccggcgacgcggtcacggcgggtacgctgaatgtcgagggggcattgaccgtcgaagtacgtgccctgggccatgacacgcggctgtccgccatcgtgcgtttgcttgagcgcgcccaggccgataaaccacgcctggcgcaaatcgccgaccgggccgcgcagtggttcctgttgtgctcgctgatcgccgccgcgctgatcggcctgctgtggtgggagctggacgcgtcgcgggcgttctggattgtgctggcaatgctggtggcaacttgcccctgtgcgctgtctctggccactcccaccgccctcaccgccgccaccggtactttgcacaaactcgggttactgctaactcgcggccatgtgctggaagggctgaaccagatcgacacggtgatcttcgacaagaccggcactctcaccgaagggcgcctggcattgagagccatccggcccttggggtcgttgagcaccgacctgtgcctgagcttggccgccgccctggaaaaccgctccgaacacccgattgcacgcgccttcgggcgtgcgccattggccgccgatgaagtcatcagttcgccagggctgggccttgaaggtcgtgtcggcgagcgcgtattgcgcattggccagccgggctttgtctgcgaactcagtggttgcccgattcctgcagcaccggaggtttgcggccaatggctgttgctcggcgaccgcgacggcgccctggcctggttcgtgctcgacgaccgcctgcgcagtgatgcccctgccctgctggccgcgtgcaaggcgcgtggttggcgcacgctgttgctgtccggggacagttcgccgatggtcgccagcgtcgccgccgagctgggtatcgacgaggcccacggcggcctgcgcccggatgacaagctgcaagtccttcagcaactgcacaaggaaggtcgcaaggtgctgatgcttggcgatggcgtcaacgatgtgccggtactcgccgccgcggacatcagcgtggcgatgggcacggccaccgacctggccaagaccagcgccgatgcggtgttgctgtccaaccgcctggacgccttggtgcaagcctttactctggcgcggcgcacccgccgggtaatcattgaaaacctgctgtgggccgggctgtacaatggccttatgctgccgtttgccgccctgggctggatcactcccatctgggcggcgatcggcatgtccctcagctcgttgaccgtggtgctcaatgctctgcgcctgactcgcctgccgagcgcgccggccgtccgagccccctcaataacccgcccgctgccggtgtgagccgcgcgggcatggagtgcagatgccagctttatacgtgatgatcccggcggcgctgctcttggtgggcgtggccatctacatcttcttctgggccgtggacagcggccagtacgacgacctcgacggcccggcccatagcgtgctgttcgacgaccaggacccgaaccacctggccggcgtcgaagaggccaaccaccccgaacaaccaccaaaagacccgccccatgcttgagctggcgccgctgctggtctctgcgctgatcctcggcctgctcggtggcggccattgcctgggcatgtgcggcgggctgatgggcgcgctgaccctggcgatccccaaagagcaacgcggccgcaggtttcaactgctgctggcctacaacctggggcgcatcctcagctatgccgcggccggcgtgttgatcggccttgccggctgggcggtggcgaacagcccggcggcgatgttcatgcgcgtgctcgccggcctattgttgatcagcatgggcctgtacctggcgggctggtggagcggcctcacccgtatagaaagcctcggacgcggcctgtggcgctatatacagccggtcgccaaccgtttgctgcccgtgtccagcgtaccgcgtgcattgctgctgggcgcgctgtggggctggttgccgtgcggattggtctacagcacgttgctgtgggcggcgagccagggcaatgcctgggacagtgggttgttgatgctggcgttcgggctggggacttggccggtgctgttggctacaggtctggcggctgagcgggtaacggcgctgttgcgcaagcgcagcgtgaggatggccggcggcttgctggtgatcctgtttggaatatggacgttacccggtccgcaccagcactggttgatgggccattagatcgccatgtggcatagcgccgctccctgttgatgcaaatcaaggtggtcgccccggccagcccctagactcggcccactagcctatccgggggaacgcccgcatgctcgacgccattcgttgggataccgatctgattcaccgctacgacctggcgggaccgcgctacacgtcctaccccaccgccgtacaattcgacagccaggtcggcaccttcgacctgctccacgccctgcgcgacagccgcaaggcggtgcggccgctgtcgctgtatgtgcatgtgccgttctgcgcgaacatctgctactactgcgcctgcaacaaggtcatcaccaaggaccgtggccgcgcccaggcctacctgcaacgcctggagcaagagattcaactggtggcgtgccaccttgaccccaagcaaccggtggaacagctgcacttcggcggcggcaccccgacctttctcagccacgacgaattgcgccaggtgatgagctgcctgcgccagcacttcaatttgctggatgacgattccggcgactacggcatcgagatcgacccacgcgaagcggattgggccaccatgggcctgctgcgcgagctgggtttcaaccgcgtgagtatcggcctgcaagacctcgaccccgaggtgcaacgggcagtcaaccgcctgcaaagcctggaagaaacccgcgcggtgatcgatgcggcacgcaccctgcaatttcgttcgatcaatgtcgacctgatctacggcctgcccaagcaaacgccgatcaacttcgcacgcaccgtggaagaggtaatcaggctacagcccgaccgcttgtcggtgttcaactacgcccatctgccggaacgcttcatgccccagcggcgcatcaacaccgatgaactgccgtccccggcctcaaagctgctgatgctgcaaaccaccatcgagcaactgacccaggccggctaccgctacatcggcatggaccacttcgccctgcccgacgacgaactggccatcgcccaggaagaaggcaccctgcagcgcaatttccagggctataccacccacggtcattgcgacttgatcgggcttggtgtgtcggcgatcagtcagattggcgacctgtactgccagaacagcagcgacctcaacggctatcagaacacgctggcgggcgcgcaactggccaccagtcgcggcctggtgtgtaccaccgatgatcggttgcggcgggaagtgatccagcagttgatctgcaatttcagcctggacttcgagaagatcgagcaggcgttcaccattgattttcgcggatattttgccgagatctggccgcaactggaggccatggccgaggatggcctgatcaaactcgacgcccaaggcattcgcgttttgccagccgggcgcctgctggtgcgttcggtgtgcatggtgttcgatgcctacctggagcaccagaacaggcagcggttttcgcgggtgatctgaaacaccctacgccatagcgagggagccggccttcaacgcgtcttccccgctgaggcctttcatggccttggccagggaggtttgtgcagtcaccaggctcgcctgcaactgggcgagtgccccttgcagattgctgaccttgatccgcgcctcgtcggggctgaggctcttgtccgccatcacggcttgcagttcggcctgtttctcggcgatctgctccttgatcttgcgaatcatcttgaggacctgctggacactgtccggcagaccgctgtcttcgatgtccttattgggtttcttggcctccgtcagggctttcaaggcagcaccggaaaaggtcaccttcaccccctcctcgtcctttttctcccgcaacggcgcttcagtagcgtccttgagctctttggcagccttggcgagcttggcctctgccaccaggtctttcggctccgcaaaggactgcacctgagcgcctgccgagttcattgcaccgatggaaatcatgaatagagcctccaggctcaagggttcgtgactttgtatcggcggcgacacaaaattctttataccgttgctggttttttgtacacgctggcctcaccggcccccagtgcgttacccttacgtcttatgtgtgttttcccacaaggatttaagaaatgtccgagccagtcaaactgcgcgctcacagccaggctcattgcaaggattgcagcctggcccccctctgcttgccactttcgttgaatctggaagacatggatgcgctggacgagatcgttaaacgtggtcgcccgctgaaaaaaggcgagttcctgttccgccagggcgacaagttcgattccgtttatgcagtacgttcgggtgcattgaagacgttcagcctgagcgacagcggcgaagagcagatcaccggtttccacctgcccagcgaactggtgggcttgtcgggcatggacaccgaaattcacccggtgtcggcccaggcactggagactacatccgtgtgcgaaatccccttcgaacgcctggacgaactggccctgcaattgccgcaactgcgccgccagttgatgcgcgtgatgagtcgcgaaattcgtgacgaccagcaaatgatgctgctgttgtcgaagaaaaccgccgacgaacgcatcgcgactttcctggtcaacctgtcggcgcggttccgtgcccgggggttctcggccaaccagttccgcctgagcatgtcgcgcaacgaaatcggcaactacctgggcctggcggtggaaaccgtgtcccgcgtatttacccgtttccagcagaacgagctgatcgccgccgaaggcaaggaagtgcatatcctcgacccgatccagttgtgcgcgctggccggtggttccctggaaggttgacgcagacacttgcggccgcgccaaccggcgaggccgcaggtatacttcgagtccgtttccagccccaggactcttcgacgatgaccttcgattcgttcgacatcaaatccctgatccgtcccgtcatcgacttccccaagccgggggtgatctttcgtgacatcacgccgctgttccaatcgccccgcgccctgcgcctggtggccgacacctttgcccagcgctacgtcgagaccgatttcacccatatcggcgccatggatgcgcggggtttcctgatcggttcgatcatcgcctaccaactgaacaaaccgctgatcctgttccgcaagcagggcaagctgcccgctgacgtgctggccgagggttaccagaccgagtacggcgaggccttcctggaagtgcacgccgacagcctgtgcgaaggcgactcggtgttgatgttcgatgacctgatcgccactggcggcaccctgatcgcggcggcgaacctggtacgccgcatgggcgcgaagatcttcgaagcggcggcgatcattgatttgccggagctgggtgggtcgcaacgtttggaagatatgggaattccaacgttctgcctgacgcagtttgcgctgactgaacaataacggttgcctgggctgatgccatcgggggcaacccccctcccacacttgaccggttcacagatcaaaatgtgggagggggcttgcccccgatgaggcgctgaaaggcactaaagatcagaagcccatctgcttactgatgatttcattcatcacctcgcgggtaccgccaccgatggagaggatgcggttgtcgcgatacagccgctccaccaggctgccacgcatataaccctggcccccgaggatctgcaccgcgtcgtaggtgacgcggtcggcggtgtcggtggcaaggttcttggccatggatatctccttgatcacgctgataccggcggccatctttgctgcctgccgataagtgaactcccgagagacctccacggcggtggccatttccgccaggcgatgcttgatcacctggaatttgccgatgggtttgccgaaggcttcgcgctcggcggcccatttgaggctttcctccagggccagttgcgcggtcatgttggccatgagcgccagggccaggcgctcgctctggaagttgcccatgatgcaggcaaaacccatgttttcggcgccgatcaggttgcctacgggcacccgacaatcgtcgaagaacaattcagccgtgtccgacgcccaccagcccattttcttcaggggctggccgacggtaaaaccgggggtgtctttttcgatcagcagcaggctgatcccggcaaagcccggcccgccagtgcggacggcgacggtgtagaaatcggcgcggatgccgctggtaatgaaggtcttgctgccgctgacgcgataatggtcaccgtcgcgaatggcgcgggtctgcaggctggccacatcggaaccaccgcccggttctgtgactgccagggcgatgatcttctcgcccgacagcacctgtggcgcgacgcgctcacgcacgtccggccgcgcccatttgacgacgggcggcaagccgatatccagcgagcccagccccgccacgacgccgccagaaccgcagcgcatcaactcttcgctggcggccaccttggcgaacagatcgccttcatggctaccaccgaggacttcgggataaccgatacccaggatccccgccgctcccgccttgaggtacaactcccggggaaagctttcggcttcctcccagtgctcaatccccggcagcatctcgcgctcgacaaagcgacgcacgctgtcgcggaccaattggtggctggggtcgaagtagtcctgataggcagacatcggcaagctccacggtgaggtggagcgaaattaccaagcgcttgcttggttatcaagccgtgccgtcagagggcgatcggtttgcggccggcaaacgaatgcgccagcgtgccaccatcgaccaattccaactcgccacccagcggcacgccatgggcaatgcgcgaggtgatcaggcctttgttggtcagcagttgggcaatgtaatgcgcggttgcctcaccttccaccgtcgggttggtggccaggatcacttcggtgaaagtgccctgctcttcgatgcgcgccaccagttgcggaatgccgatggcttccgggcccaggccgtcaaggggcgacagatggcccttgagcacgaagtagcgcccgcgataaccggtctgctccaccgcgtatacatccataggcccttccaccacgcacagcagcgtgtcgtcgcgacgcgggtcggcgcattgcgggcagagttcttcttcagtgagggtgcggcactggcgacagtggcccacgccggtcatggcctggctcaaggcctgggccaaccgggtgccgccgctgcgatcacgctccagcagttgcagcgccatacgctgggcggttttctggccgacacccggcaatgtgcgcagggcgtcgatcagttggcgaatcagggggctgaagctcatgggcgaagggtccgacaaaacaacgagacgcggtttatacccgcgccccggattagcgtcaaatgcgcaccaccaacttgccaaagttgcggccctcgagcaaaccgataaaggcctcgggagcctgctccagaccgtcgaccacgtcctcgcggaacttgatcttgccgtcgcgcacccacggcgccatggcgctgaggaattcaggctggcggtcaccgtagtcatcgaacacgataaagccctggatgcgcacgcgcttggtcaacaaggtacgttgcagtgtcggcaaacgatcaggcccgctgggcacttcatgggcattgtagccggcgatcagcccgcacaacgggatccgcgccttggggttcaacagcggcaccaccgcgtcgaacaccttgccgccgacgttttcaaaatagatgtcgacgccgttgaagcacgcctgggccaggtcatcggcaaaggtcgcgctcttgtggtcgacgcaggcatcaaagcccagttcgtccactacatagcggcacttttctgtgccccctgcgatcccgaccacacgcaagcccttgagcttggccacctgccccaccaccgagcccactgcgccggatgcggccgccaccaccagggtttccccggccttgggttgaccgatgtccatcaggcccatgtaggcggtcatacccggcatgcccagcacgcccagtgccatcgacgggctgggcaagcccttgggcaccggcatcaggttgcgaccatcggaaatactgtggctctgccaaccggtcgcgcccaccaccaggtcgcccacttcgaatttcggattgcgcgactgctcgatacggctgacagcaccaccggtcatcacttcgtcgatttccaccggcgccgcataggacggagcgtcgctcatgcgcccacgcatgtaggggtcgagggacaggtacagggttttcagcaggacctggccgtctgccagttccggcaggttcacccgctccaggcggaaattttccggggtgggtgcgccctgggggcgtgagaccaggacgatgcgctggttcagggtcggttcttgaggcatgaaggggctcctttatcgattccatcggtatagggtgcagaccatgcgtggcgtgccagggttcatattggacgcgaagcgtcggggggcggcattcccacgcagagcgtgggaacgatcagcccgctcgccacaacacgaacaaaaatgccaggcacaaggcctggcattggagtctagctaaagctcgtcgatcagaacggcagcttcatgcccggaggcagttgcatgcccgcggtgacgccgcccattttttcctggctgttggcttcgatcttgcgcacggcgtcgttgacggccgcggcgaacagcgcctcaagcatttccaggtcatcttcgcccacgcctggcaggacgctcgggtcgatgctcacgcgtttgatgtcgtgacgaccggtcatcaccacgctgaccatatcgccaccggctttaccggtgacttcggcgttggccagttcttcctgcatcttggccattttttcctgcatctgctgcgcctgcttcatcaggccggccatgccacctttcatcatgggaatcacctcaaaagtacgtggatcaataagtagcccggttttatgacgcctggggcaccggggcttcgacaggttcaatagtatcgtgacggacgaccgcaccgaactgttgcatcatttgctggatgagcggatcggcatggatcgaatcctcggcctcacgctggcggttgatgcgccggcgggtcgcggcctgggccggggtttcctgctcgggcttgatcagctcgatggcgatggtcaacgtacgctcatggtactggttcagcgcatcgttgagacgacgctgttgggtcgcgttgaacagggcgctgtgggccgggtccaggtgcaacaaccagtggtcgccttcaatggaaatcagcgtgcagttggcggcgatgctgccggtcatgccggagatcggcagtttcgggaacaactccagccattgcagggccaggccggtggccggcgccgcagcgggctccgcttccggctcgggggccggttcggcggtgtgctcgctggccagatcgtccaggtagctgtaggccgaatccatgtccggctcgatgtagtcttcgtccagcggtggctcgtcgtcgaggtcgatgcccggcgtggcggcttccacctgcgccacggtgggctcggggacgggtgcagagacccattcgggagcatccggcaccacgctgtcgggagtcggcgtgggcatcggcgtcagctcgggttgctcgccggtggtttccagcacgggctccacggcgggcacttgctcggcctcgacttcagcttcgaccggatcattccagggcaggtcgacgacgggctcaggctcgacaacaggttccggctcgaccactggcgcagccgccacaggttcaggcaccggcgcaagagcaggcgcagcaaccactggcgcagcaactgccgcgccagccactggtttggcggaatcaactgtggcctggctgatccccactggctttagcggctgtctcggcgcgtctgccgaatcggcgggccggaaggccagcattcgcagcaacaccatttcaaaaccgccgcgagggtcgggcgccaggggcaggtcgcggcgaccgatcaggcccatctggtagtagaactgcacatcttcggccggcagcgcctgggccagggccagcacgcggtcgcggtcgccatggccgttgtcgacgccttcaggcagcgcctgggcgatggcaacacggtgcagcacgttgagaatttccgagagcacgccgttccagtccgggccttgctccgacagatggcgcacagcttcgagcagcgccttggcgtcgccttcgatcagcgcgtgcagcacgtcgaagacctggccgtggtcgagggtgccgagcatggcgcgcacgtcggcggccatgaccttgccttcaccaaaggcgatggcctggtcggtgaggctcatggcatcgcgcatcgaaccatcggcggcgcggccaagcagccacagcgcgtcgtcttcgaacggtacgttttcgacgcccagcacatgggtcaaatgctcgaccacccgctcgggggtcatgtttttcagggagaactgcaggcaccgcgacagaatcgttgcaggaagtttctgcgggtcggtggtggccaggatgaatttgacgtagggcggcggctcttccagggttttcaacagggcgttgaaggaatggctggacagcatgtgcacttcgtcgatcaggtagaccttgaagcggccacggctgggcgcgtactgcacgttgtcgagcagctcgcgggtgtcttcgaccttggtgcggctcgcggcgtcgatctcgatcaggtcgacgaaacgcccttcgtcgatttccttgcacaccgagcaggtgccgcagggcgtcgaagtgataccggtttcacagttcaggcatttggcgatgatgcgcgcaatggtggtcttgcccaccccgcgggtaccggtgaacaggtaggcgtggtgcagccgttggctgtccaaggcattgatcagagccttgagcacatgggtctggccgaccatttcgcggaacgagcgcggacgccatttacgtgcaagaacctgataactcatcgaaaaccgtcgcaactgggaagcggaagccggtaatgctagcggagcaagggggaaattgcatccggcacgctcgcctaatctgactaagcttgccgggttggccccaaaaaggcctgaacccggagtgtgtatgcgcgtagtcctgggcgctttatggatgatcaccacggcttgcctggcagcgcccgcaccgttgcgtttctcggtttccgacagctgggcgatgcccctggtgcaattggagggcggccggcccacccagggcattttgtatgacctgatgttgagcctggctacccaggtcggcaggccggccgaattccatgtgttggcacgggcgcgtatctccagcgccatggagcatggcgatattgatgtgcgctgttatgtcacccaggcctgggtcgacgacgcgtccggcgattacgtctggagcgtgccgctgatggtgcagcgcaacctgttggtcagcacccacatccccccgaagccggtagagctggacacactcgcgccgcaggcgatcggcaccgtgctcaattaccggtatacgaccctcgacccgctgttcgccaaagaccaactcagccgcgacgatgcgcgtagcgaagagcaggtgctgcacaaactggtggccgggcgcttcaagtttgcggtgagcaacgaatggatactcgaccgtttcaaccaacgcctgccggtcggcaaacggctgcacaaggttgtggtgattgatgagcagcgcctgggctgtatcgtgcgcaacgccccgaatgtgccggtgcagcagatcctgcgcaccttgctgcgcatgcagcagtcgggcgagatcgagcagatcatccggctctacaccggtgagactcctgacagaaactgacagtgccgccttatagacttggcgccatcgaacacgcattcccaaggagcctgcatgaacaccctcgcccattacttcctgctgtacgtcgacagcccggccaccagcgccaacttctatagccgcctgctggacaagccgcccgtggaactcaacccgaccttcgccctgttcattctcgacaatggcgtaaagctggggctgtggtcgcgccataccgtggaaccggcgacccaggtcaccgggggtggcggcgaagtgggcttgtccctggctgacaaagccgctgtggacacactgcataatcaatgggtagcgcgcggcgcaaccatcatccagtcaccgaccaccctggacttcggctacaccttcgtcgcccaggacctcgacggccaccggctgcgcgcgttttgcctgagcgactgaccgccagcgcccctccaggctgatggcggctacactggccaacacgatcacaccgcccagcaccacttgcagggcgatgtgctcaccgagcagcgttgccgccatcgtcatcgccaccggcgggatcaggtacatcgccaccgatgcgcggctgacctcgacatgtttcaacacatagccccaggccaggtacgccagggcgctggggaaaatcccgagcaccagcaccgcgaggttctccggcaacggcgcctgcaccacggcagccgacaggcccggcaggttcacacagagcatcaaggtgccggcccagaccatgtagcaggccatcgtcagcgggctatagcgatgggcgtaatgtttctggatggcgaagtacaggctccatgacaccgccgccagcaggatcagcaagccgcgcgggtcgatatcgcccacgccgtgatcgccccagatcaccaccagcacgccgagcaaacccagcagcacgcagctccagcgccagaggctgacccgttccttcaagcagaagaacgcgatcaacacgctgaacagcggcgccgattgcgccagtacactggacgccgccgccgtcacgaactgctggccgtaattcaggctggtgtggtgcaggaacaccccgaaaaaactcaacaccaacagccacggcagatccctcagacgtggccgaccgatgcccagcatcagcgccacaccggccatgaacagcgaggcgatcagaaaccgcagcagcgcaagctggccagggctgtagctgtgcaggccgatgtgcacgccaatcggcgaataggcccaacagaggatgacgctggcgatgactagcgtaagcttcaggggtgacggggtgttcatcgacggcatccgaaacggggaaggaatgccgtcagtcttcgcccgagcaacgcgcaggacaattaaccgtttctgacttctgaaatcactggaactgagcaatggaactggcccaattgaaaatggtgcgagccgtggcgcaaaccggcagcgtggcccaggccgccgtgcaattgcattgcgtgccgtccaacatcaccacgcgcatcaagcagctggaaagcgagttgggcacaccgctgtttatccgtgccggacgcgggctggcgatcagtgcggccggtgagatcttcctggagtattgcgaacgtatcctggcgctggtggacgagtccaaacgcgcggtcgacgccaacgcgattccccgtggcaccctgcgtatcggcgctgtggagtccagcgccagcggacgcctgccgccgttgctggccgaataccatcggcgctacccggatgtcagcctggagctggtgaccggtgcctggggcgaactgctcgatgacctgcaacaccaccgcctggacgtggcgctggtggccgccggcaacaaacgcgcaaagctcgaacacagcgtggtctacagcgaacgcctggtgctgatcgccagcgcctccagcgcaccgatccgcagcgccgaagacctggccggtcgcacgctgctggtatggccgcccggctgcccttatcgggcggcgctggagaactgggtcaagccccacgcgttcaagccggccattgccagctatgccagctggggcacgatcatcggttgtgtcagtgcgggaattggcgtggcactggcgccggaaggcatcctggcccgctatgagcaggccaatcagctggcgtcgtaccggttcgaggaactgcaggcggtggacaacctgctgttctggcacaaggacacccagcggcacctggcgcgggatgcgtttgccgggttgttgcgcgaaactttcggctgatcagcttttgggggcagccagatggctgtactgatcctggctgatccacccggtaaacgagcggtcatcggcattgatgaactcgacctgggcccagccatccttgaaggccagcactccaaccacatcattcttgacgatgtacggacgcttggcggccttggcacttgggtttttcagcaggtaagccttgtcggcggacaccttcaccaggccgatccatttcgtgttggcggtctggctcaggtccaggccggtggcgatctccggcatcagcacattgaggcaacccggatgctggcggccttctgccacggtcagggtcacaccatcggacgagggtgccaggctgccggggtaggtggcgtcggcccaggtagtcagcgcagcgggtttgccttgcaggtagaacgtgcaactgcgggtgacgccctcgcccatcgcttccgagtagtaaccctccacctggtgctcaggcgtcaccgccagcatcagcccttcatacttgcccgaatgcaacgcgggcgaaccggcaaacgcaggggctacagcgcacaacgacaacacaccgatcgctagaaaacggatcatcttattttttcccttcaagtttctcgtaggctttttgcataaggacgtcatagttgccgtagtcctcgccgttatagttacgcgccatgccggtaaaatccttggctttcatggccttcatcaacgccgggctcttgctgcaaaaaccgaggaaggcctttagttggttaccggcattcacttttaatgccgcagaaaattcaaacaccgtcttgtaaccgcaggacgcgtagttgaaacccatgatctgaaacatgccccaggacgccgacatcaacgcggcttcctgatccagcgcaaacgcggtggccatggtttcccaggccttggtctggtccttgttattggtctgccactgtggcccggcctttttcttgtaggggtaggacagtagcgggtgcgcctggtcgtagatgtgcttggtgcacttgcgaaacaggtgcccttcgaaggcgattaccggcaatttggccgggccaaaacctgaacggccgccggattccacggtggcgaaggccttgatgatgttcaccgaaataccaccgcccaactgcgtggccgcgttctggaaatccgtctcgctgagggtcatgcccccgtcgcacgtggcctgcagcatcaattgacggttgcgcttctcggcctcgatcatcgcgcgcatgcggtccaggtacacattgaccgtggcctgcaccgcgtcaccctgattgttgccgaacacattcagaaagctcgggatacgcatgctcgggaacgcctttaccggcaccttcaccgcttcttcgatcaggctgttgaaggttttaccggtcgggtcgatcacgctatcagggtgggcatatttgagatgacggaattgatactggctgatgcattgcaccaattggccatcgcacttgccgttttcggccagcgggaagcccatttttggaatgatcagattgaacaagtattggacgcactgcacatcggcgggcaagttgcgggctttgccgggcgcgcctaccgaagcactgataagacggggcaacccttgcaggcttttcatcacagacatccttgttagttaaaaaagcgatggcacttcaatatcaacttcacacacttgtcacactctgaaacaagtggctggcggaaactaacaaggtggttttgggttgtaaagcatgcaattttaaagttgtgaaatagctatcggataacgtccagcacctggcatttctggtgagtcgcgtcagactctcgtaacgaaatggggtggagggacgcctgcccggtcaggtttgcttagcgtttccatgatttccctttaatatgcgatacccgcccaccaagcagagggatgcgctcaaatgcccggccagataatcgaatcggagaaacgactgtgaggctcgacaaactgcgcgtgcagaattaccgctgttttggagagtttgagatcgacttcgatcctcatctgaccgtcttgattgcatccaatgggggcggtaaaaccaccattctagatgctgcacgggttgccctatggccttttgtaaaaggcttcgacctcggaagccagaccggaaaatccgcgacaatacaaatcgacgatgtacgtctagccaatctctccagtggcaacatggagcctcaaatcgccagcattatcgaagccaggggcgtatgggcgccagacgaggttgaaagccattggttacagcagcgcacgagcttgaaaaaatcgaccaatacccttggtgatttgggttcgaaagctctgacgggatacagcaagtctcttcaggaaaaagtacgcagtgatgagaccgtcgtcttaccgttggtgagctacctcgggacgtcccggctttggtacgaaggccgctttacttcggcggcagcccaaaccacgctcgacaagtctgaatactccagaacatcggggtatctgaactgcctctcctactcgtcaagtttcaaaacgtttaccgcatggtacggctgggtctatcgcagctatcgggaagcgcaggtgattgctctggaacgcaatgcacagctaaccgatcttggtgttcggttcgcgcagatcatcaagtctgtcaaagcggcaattgatcaattgttacaggctccgacaggctggcacagcctggagtacagtgagagccatcaacagcaactgatcatgcaccatcccgaacagggcatattgcctgtagaaatgctcagcgacgggctgcgcaataccattgccatggttgctgatttagcgtttcgtgcctgcaagctcaacccacacttaggcgaaaaggctccgttacaaactcccggtatcgcactgatcgacgaggtggatatgtttctccaccctcactggcaacaagtaatactcggatccttgcgatcagcttttccagcgatgcaattcattgttactacgcatagcccacaagtattgagtaccgtacgacgcgaaaacattcgagtcattggcaaggacacgcacggcaacctggttgcctcacccccattggcaatgacctatggcgagcccagcaatagcgttttacacagcgtgatgcaggtagatccgcagcctccagtacttgaaaaaccagatttgttgctgctcaccgaatgggtggacaagggccgatacgacgagcaacctgccgttgaattaatggagcgacttacacgcgtattaagcgatcagcaccctcaacttcagcgcctgcagcgcagcatcaaacggcagagagcacttagaaaatgagggctattcaaaagcggggccttggtcctcatcaattgaataactcacatgcaaatccacccattacagccaaggcggctaccagtcgatggtcagggtttggctacaaacaacaggttttgacctatctgctggaagagcagtatgggctgtgctgctacagtgagatcagacctgatcaggtcggtctaggcctacacatagagcacgtcgaaaataaaagccagaatccacaacgtacctttgattacaacaatctggctgcttcagcattggatagccaaaccgatctgcacaccttcaaggggctcgcgtcagcagtgttcggcggtcacgccctgggaaagtcggacgcggtagatgtccatcgttttgtatcctgccaccagcctgattgcagccgcttttttgcgtacctttctgatggtcgcattgtgccggctgacgggttatccctggaagatgaagaccgagcgtcatacaccatcgccttgctcaacctgaatagcccatttcttcaagacttgcgccaacaatggtgggacgaactggaagcgcttttcgatgaccacatcgaacaggatatgagccttcattgccttgcaggtattgatctcattcctcgagaaaagcgactaagtccgttcttcagcatcacccgaaatttttttggccaaattgctgaagaagtgctggatcaagatgcacctaatctgaagtagttgagacctatgacttgatcagtaaccgtggaactccctggttttctgataggtgtggaaatcaatccactcgactacatcgtaaggcaggtaaagctgcatccgcgcgcgggaaatggcgatatacacctcgcacagccgttggtcgaacgcgtaggcgtccttgaacttcacgttggtcagcaactcgggcgtcagcaatacccggtcaaactccatgccgcccgcctctgccgccagcattagcaggcaacgcttgccgggcacgccgcccagtcggttcaagcgtgtgatgtcggcgacgttgaagcctttttccaactcgctctcgacccacagaaacgcttcatcgaactggctggcatcgcgcacctgttgccaatcgtccatgtcgctgaaatacgcatggggaccgttgtcgttgtgctcgttgctgtagaactgcggcttgaacaaggcgatgacgctgatcatgaagcgctgcagatcctgctgcgctgcagtgtcgaagaacccgaacgggcagttggcctgctgcaactggatggcccatttcatggtgtcccaatgggaggcggtcaacaccacgcagccttccggcggtacgaagccctgggggtaatgttcgatgccgacgtccgcgtcccgtgcgccttcgaagggggtcttgcacttttgtgagtgcacgctgatcaacgggttgaccaggcgctcgacgttgcggcccgagcgcaccgagtaactgatgtcggtgtgccggacttcgcgctttcttcgcaccatcacaccgctggccaattggtattcatcgccgagggtgatcaatacctggcggccacgctcgataatctgcaacaacgaaggcgggatgtcctggctttcatcgatcaacacgtgggtatagcgaggcggcaccacacagccttcgagactcgcacgcttgatcagccacaatgccgcgaaggcagtctggccggcccactgtgggttggcctccaggtacgtccacaaccggctggaatactccagcaacgcctgggtatccacgctggacaacgggtgcttgaaatgcggcaggtgcctggccgacaggctgtgatgactggagtggcaatagctttcgagcaccttcagacagatatccagcgtcgccacgccctcgtgcccccgccagccgtggatattcagggtctgcgacacttcatgcttgccgggcaacctggcaggcgtgccctgcacggatgggcgcggcccctgcagcagcgccttggcgaacgcggcgaaggtcgaacccgccttgctgtccttccccaaccccatgcgctcacgcagggtcgccagtttggcccctgtgcgtgccagcaccagggtctgggcggggcgcaggcactccatcaaggcgccgagcaggtggctcttgccgatgcccgcgtagccctggacatgcaggtcttcattgaggttggcgcggaaggtacgcaccagtttgtcctgggccgggctgagccagcgctcacgctggcggggcgtgatcatctgttggctgaatggatcattgctgcgcaggtggcggaccttatagccgatatcccatttgcccgtaggcagcaggtaatcccgcgccgcgacttcttcagccgacagcaggcgcaggttgacgcttttaagcgcgttgaaaccgaagtagagcttgcgcggatcgaacagtcgctgggcttcggacagcagcgtcgcagcgccccctgcccgcgtgtcgaccgaccagtcgagcaacttggccaggatgcgttcggcgcccgcgcaggtcaggtctttttccgcggcctgggccaggttctggatgaccagtacggcggccagttccgggtccgtcaggccagccagggccagggcgccgtccgtaccgagcagggccgtgcaggtttcatccgtgacaggcaggaagaccgggctggataaatcgaagtgttcaggttgcatagtgcctcgccgccagggaatcaggcattgccctgaccgcccagttcaaaccgatactcgcccagggagcccgacataccgccgcaatgagggcctgcgtcagccgcagacgccatcgcattgatctgttgctggagttcgaacacagccatatcgagcaaccgccgcaagtcttcggcgctctgcgcggccacgttcaattgcagcgtgcaggcgcccgccagcggtggctgcgcgggctcgtcaacgacttccgcagagcggatcatttccgcctggctgaggatttccgcgtgttcatcgtccatcaggtccagcaccctcgacaattccagggtctgctcagggtgggattgaatgcggtccttgatctccaggcggcgcatctgccattcccgcagtttttcgcgagtgaggtcgtcgactttttccacgtgtgctgtctccggatgccaggcactggagtatgccgccatggactgcccgatggcagatggcgtgaaagcatttttgatttggatttgaagaggtattgcaaggaagagcgttatggaggcaaccccaccagccacaccccggcacacaatgttcccgctgtggctgctgccttccggctctgaccaggttcacgggtaatcgttgcggggggaccgatggggtcaccataacgacgctggcctctcggcaagcggggccattgtaccgatctcatcggaagttacaaccgttggggccggattaaaaatatgaaggggttcaagtacttgtcaccgtcaacggcatctgtgggagggggcttgcccccgatgacggtacatcagccaataaacaggtgactgacccagcgccatcgggggcaatccccctcccacagcgctcatcattgtgccagtaccacctcatctgctcggccgccttcttcctggatcaccaggtgaatgaagtgcagcttggcgatcaccgctggaggcagcacaaagggataaaaatccggctggcccatgctgcgcgacagttcgttgagcatgccagccagttcgatccaagcgttgacgaatgacaggaatgccacgccgcccgggtgttcgggatcatagagcgtgctgaggggaaatggctggtaatccaggtccatctcgcgggcgctcatgccaaagccgagggcggtgtcgacggcatccatcatgtgcaggtagtgcgcccaggtttcagcccagtcttcccaggggtgcatggtggcgtaggcgctgacgcaggtttgctgccaatcggcgcgtgggccgtgctggtagtgctggtcgagggcgtcggcataactggcacgttcgtcgccgaacaggttgcgaaacggttcaagccagtgggtattggcgatcaggcgatcccagtaataatggccgacctcatggcgaaagtggccgagcagcgtgcgatagggttcgcgcatctggacgcggaccttttcccggtgggcgtcgtcggcttccttgatatcgagggtgatcaggccgttcgcgtgaccggtcatgggcgcgttgccctccaggtcgataccgacaaaatcgaaggccaggccggtgtcttcgtcgacgcttttgggcaccacttgcaaacccaggctgatcaattgcgcgaccaaccggcgcttggcggtttcgactttgcgccagcgctcgtggttttccgggatcgacaggtcaggaatggtgcggttcaggctgcatgccacgcacagcggcgcagtgctgtgcgccgggatcagccagttgcaggcggccggggtgtcgaggttggcgcagcggcggaaggcgccggcgtcgaggttaccgtcctgcagccaggtgccttcgaccgggccgggctgcagggagtccagccgggcttgttggggttggtagcccagcagcgcctggcaggccaggcactggctgttgcgaaagaacagcgattggccgcagcggcactgccacaccttgctgtcgcgggatgtgccggctacgaacggtgcagcgatgcgcgaactgagttgctcgaagtagcggaacatggcgatctctccctgggtgactgagactagatcactttctgttcaggatcgttccactttcgttagggttggggggctgctgcgcagcccgacgcggggcaagcccgctcgccacagcaagcccgctcgctacaaagtgcaaatcagacggtgatgttgtgcttggcaaggaaggagacgaaggcttcttcatccaataccttcaggcccagttcgctcgccttggccagcttggaacccgcccccggccccgccaccacgcagtgggtcttcgccgagacggaacccgccaccttggccccgaggctttcgagtttttccttggccacgtcacggctcatcagttccagggagccggtgagtacccaggtgtgccccgcttcgggcaaaccttcgacgaccttcttctcgctcaaccagtgcatgccgaagtccttgagctgctgctcgatggccagggcatggttggcgttgtctgcgttatcgaagaactcacgcacagccttggcctgcttttcgggcagcgcctggcgcatatccagccagtcggccttgatcacgccttccaaggtgccgaatttgtccgcaagtttctgcgcggcgccggggccgacgcttggcacatgcaacttgtcgagcaagccgcccagggtggtactggcggcgaattcggcactcaggtcgccctggtcctgcaattgcaggccgcattcgtctggcgacagcagcgcaccgatcacgtcctggttatggctgtcttcaaagaagctgtggatctcgtgcgccacttccaggcccacgtccggcaggtacgtcagcactgccggcaaggctttctgcacgcgctccagggatgccagcgaacgcgccaacaccttggcggtctcctcgcccacgtcgggaatgcccagggcgtagatgaaccgcgccagggtcggggtcttgctgttttcgatagcggtgatcagcttcttgctggaaatatcggcgaagccttccaggtcgatgatctgctcgtacttgagcttgtagaggtcggccggcgagccgatgagtttttcatccaccagttgctcgatggtcttgtcgcccaggccatcgatgtccatggcgcggcgcgagacgaaatggatgatcgcctgcttgagctgcgcaccacaggccagacgcccgacgcaacggtacaccgcgccttcgctgacggtttccttgcccttgctgcgcttgaccagttgcgtgcgctccacatgggagccgcacaccgggcagctctgcgggatcggcaccgcacgggcgtcttccgggcggcgctcaagcaccaccgacaccacctgcgggatcacatccccagcgcggcggatgatcacggtatcgccgatcatcacacccaggcgcgcgacttcgtccatgttgtgcagggtggcgttggacacggtcacgcccgcaaccttgaccggcttcaagcgcgccacaggcgtcacggcgccggtgcggccaacctggaattccacgtcgagcagttcggtcagctcttccatggccgggaatttatgcgcgatggcccagcgcggttcgcgggcgcggaagcccagttcacgctgggaggcgatgctgttgaccttgaacaccacaccgtcgatctcatacggcaggctgttacgccgctcgccgatgtcacggtagtactccaggcaatcctgaatgcctttggccaacttcagctcatggctgatgggcatgccccactgcttcaactgttgcaggttgccgatgtgggtgtcgctgatatcggtggtcacgccgtagcagcagaactccagcgggcggctggcggtgatcttcgagtccagctgacgcaggctgccggcagcggcgttgcgcgggttggcgaaggtcttgccgccgacttccagttgcgcggcgttgagtcgctcgaaaccggccttggacatgaacacttcgccgcgcacctccagggttgccggccagccactgccgtgcagtttcagcgggatgttgcgcacggtgcgcacgttgacgctgatgtcttcgccggtggtgccgtcgcctcgggtggcgccgcgaaccagctcaccgtcctgatacagcaggctgaccgccaggccgtccagcttcggttcgcagctgtattccaccgccgcgccagcgccgaacaggtcgcccaccggcaggtcgaggccttcggtgacccggcgatcaaactcgagcatggtggtttcatcaaacgcgttgcccaggctgagcatcgggatctcatgcttgacttgggtgaacgccgacaacgccgcactgccgacccgctgcgtcggagaatcgcgcgtcaccaggtccgggtgctcggcctccagggccttgagctcgtggaacaagcggtcgtactcggcgtccggaatactcggctcgtcgaggacgtggtagcggtagttgtgctgatccagttcagcgcgcagttcgaggatgcgggtgtgggcggcggtcatgggtgttctctcataaagcaaaagagcagccgaagctgctcaatatgttagtgcacggattctacagacaacgcttaagatcggacctcagcgcttctgtgtcagggcgcgacgctcgaactcgacgatgcgctgacggtagtgttcgatggtttgcgcggtcagcacgctgcgctggtcgtccttgagctcgccattgagctcctgggacaacttgcgggcggcggccaccatcacgtcgaacgcctgcttcgggtgacgcgggcctggcaggccaaggaagaagctcacggccggggtgctgaacaggtcgatatcgtccaggtcgaaggtgcccggcttgaccgcattggccatggagaacagcacttcgccgttgccggccatgctttcgtgacggtggaagatatccatctcgccaaaccgcaggccgctttcgaggatgttctgcaacagggccgggcccttgaagccagcagcgtcgcggcagatcacgctgatcaccagcacttcttcggcggccggctggtcgttcacggactggcgcggggcattcttgccggcgttttcgtcggggaaatcatcgtcgcggctgctgaagctcgggccgtcattgacgtcaaggtccaggtcagcctggcgcggttctgcgaccaccggagcggtgcgcttgccacgcttggatgacggctcgcgggcttcacgcaccggcgcgctcatcgacggcaagtcgtgctcgtccagttgcggttctttatgggtgtccagcacacggggcggccccagcagctcggcgctgccgtcgtcgtcgggcaagttggacaggttgcggtccagacggaatttgagcttgcccttgccaccgcgcatgcggcgccagccatcaaaaagaataccggcaatgacaataatgccgatgacgatcagccactcgcgcagaccgatttccatgtaatcccgtgcctctaataaaaaatgctgaaaaataaggggtttagcaacgtgcaaaccgctttaaaacgtggcgccaactctatgttctgactgacgttttgcccacgcatacgaaaatttgacattaaactagcacgaccaaagataactttacaccgtctgtcaaaatgccttgaacaaatatgtccatttgccactttcgccagaccggtaaagcctcttaccgcacgctacaaaaattctttgccggcatggatcaagactccaccatcgccatcgcttcttcgacatctaccgccaccagacgcgaacagcccggttcgtgcatcgtgacccccatcaactgatccgccatttccatggcgatcttgttgtgggtgatatagatgaactgcacggtctgggacatctctttgaccaaccgcgcgtaccgtccaacgttagcgtcatccagcggcgcgtcaacttcgtcgagcatgcagaacggcgccgggttcaacttgaagatggcaaataccagggccaatgcggtcagggctttctcgccgccggacaacaaatggatggtgctgttcttcttgcccggaggccgcgccatgatcgttacccctgtatcgagtagatcttcgcccgtcagttccaagtaagcgctgccaccgccgaaaacttttgggaataacgcctgtaaaccgccattaatctgatcaaaggtatccttgaagcggttacgggtttccttgtcgatcttgcggatcacgttttccagggtgtccagggcttccaccagatcggcgtcctgggcatccagataacgtttacgttcggattgctgctggtactcgtcgatggccgccaggttgatcgcgccgagtcgctggatacgtgcggcaatgcgctccagttcttcttcggcttctttctcgttggcctgggcggtcagggtgttgagcacgccgtgcaggtcgtagccgtcttccagcaattggtcttgcagggtcttgcggcgcacggtcagggcttgccattccatgcgctgctgttcgagctgaccacggatcaactgggattgctgttcggcctgggtccgacgtttttcggcgtcgcgcagttcgcggtcggcgtcttcgagggcgatctgcgcggtcttgagttcttcgtcgacggtcatgcgcttgtcgagcaattcttcgagcttcaggcgcagctcttccagcggcgcctcgccctcctccaggttgaggctcagttgctcgcgcttttcggtcaggcgttcggactgcatctccaggcgctcaagggcttgggcggtggacgcgtgctgggccttgagcgaccccaggcgcacggccaactggtgggcgtggtccttgtgctggcgcgcttcctggcgcacacggtcgaggcgttcgcgcaggctgtcacgctgggccagcaacagttcgcgctgctcggtatcgagggccatgctgtcgagggcttcctgcaactgcaggcgcgcttcgccgatctgttcgtgttccagggcgcgctgctcgcccatttccgcgacttcttcgtcgagacgggtgcggcgcagggtcagttgctcgaccttggctttgctcgcggaaagctgggccttcaattcgccttgctggcgcgcttcgtcctgcaacaggcggcgcaggtgttcgcggccggtctcttgctggcgctgggtggcacgcagggtttgcagttcgatttccaggctttccagggtggcttcgcgctcttcgcgctcggcgatcaggttgacgatttcctggccacgggccaacacgccgctttccgcttcactggcgcgacgcacgcgcaggaagtggcgaccgacccagtagccgtcacggctgatcaggctttcgccagcgcccaactgaacgcgctgggccagggcctgctccaaagagtccactggcttgacctggcccagccacggcgacagatcaatcgccgcttcaactttatccagcagactccctggcacccgcgtaccgtcagcagctgggctgagcaaacgcaggtcgccctgggcaaaaccggccaggtcgaagccgccaaagtcatccaccaacaccgcttgcaggtcggcgcccaagacagtttccaccgccagctcccagccggcctcaactttcaagccttccgccaaacgcgggcgctcggccaggtgctgatcgcgcagccattcggcggtgccggtgcctgggtctaatgcagcttgctgcaacgcctcaagggaggccagccggccatcgagccgctgcaaatcaccctgggcctgttgctgtgcctgggtcgcctgttgcaactgctgacgcaactgctccaggcgttccacttgttgttcttcgctggcttccagctcttccagcgtcatttcgctttcggccagttgctcgctcagctccatgatcgccgcgtcttccgggtcggcggacagcaacgcacgctcttcctgcatacggcgttggcgctcggccagacgctccatactgctttccagctgctggatgcgtgactgctgcacttcggcctggcgccgtggttcggcagacttcaggttgaaggtgtcccactgctcctgccagccatgcatggtggcttcggattcttccagggcggcggcggcctcttcggcggcggcactggtgacttcctgctcaggggtgagcatgtccagctcttcgccgagggtcagcagcaaggtgcggtcgtggcccaggtgggattcggtctccaggcgcgcgcgctcggcttccttgaggtcatcctgcaactggcgcaggcgctgctggccgtgctggatgctctgctcgacgcgggcgatatcgcctcccaccgaatagaagcggccctgcaccagattgaagcgctcggacaggtcatgatgaccgtcacgcaggcgttcgatgctagcgtcggcattgcgctgctcggccaccagggcttcaaagctgatctcctgggtgccgatgatcgcttcgcgctggcccacctggtcattcagcgcctgccagcgcagggccgacagttgtgccttgagctggcgttcctcacccttgtattcctgatacttctcggcggcctgggcctggcggtgcaggcgctccaactggcgctccagctcttcgcgcaagtcggtcaggcgggcgaggttctcgtgggtgcggcgaatgcggttttcggtctcgcggcggcgctccttgtacttggagatgccggcggcttcttcgatgaagttacgcaggtcctcgggcttggcttcaatcagcttggagatcatgccctgctcgatgatcgagtagctgcgcggccccaggcctgtgccgaggaaaatatcggtgatgtcccgacggcgacacttggtgccgttgaggaagtagctgttctggctgtcgcgcgtcactttgcggcggatcgaaatttccgcgtaggccgcgtactcgccgatcagggtgccgtcggagttgtcgaacaccagttcgatgctggcctggctcaccggcttgcggctggtggagccgttgaagatgacgtcggtcatcgactcgccacgcaggttcttggccgagctctcgcccatcacccagcggacggcgtcgatgatgttcgacttgccgcaaccattgggcccgaccaccgccgccatgttactggggaagttcaccgtggtcgggtcgacgaaggatttgaaccccgccagtttgatgcacttgagccgcacgtttaggcgtccgccaacgcagcgatgaccagcgagcaactgcgctggccgtacgccgacagcaccaggcgaatctgcggcaagtcacgggcaagtacggcggcaagcagttgctcgaacaacgccaggtattcgctcatggaggccttgcgttgatccagcgccaggtaataggcgcggttcatcgccggctgcaggttctcgacggtttcctgcaaatacgggttattggcgaaggggtacgcggcgcgcatcacgttgaagctttcttcgacgaaagcgcggatgtcctcgcgctcgtaactggtcaccaggcgctgctggatctgcaggaacggcgccatgtcggcctgcacctgccagccctgggccaccgcattgccgagcaggatgtacagctcgcccatcaaggtgcacaggctctgcaccttgtgcgccgttaactcggtgacgtgggcgccacggcgcggaaggatcgcgatcaggtgacggcgttcgaggatcagcaaggcttcgcgcacggaaccacggctgacattgagcgccagcgtgaccttctgttcctggatccgctccccaggcttgagatcgccgcgaatgatgcgttcggcgaggtggtgagcaatttgctcggcgagactgtccggcgccttgaacgtcatgttttcccttcaaaatcttctatcggtacaagcgcggcagtgtagcgcattggctggctgatggcgctacgcccaccgtggcgaatttggcacggaataagcagcgatgaacagccacaagcccccaaaaacaccggttccagaagactggaccataattgaaagtgttgcgatcgcattttcttgaccttccggtcagaaaatcattgaccgaaaagtcagagatgactagattcggcgcaaagcggttaacaacaataatgagtctgcgaggccttccgtgatccagtttttacttaaccaggaactccgtagcgagcacgccctggaccccaacctgaccgtgctcaactatttacgcgagcatttgggcaaatccggtaccaaggaaggctgcgccagcggcgattgcggggcgtgcaccgtggtggtgggcgagttgcacaccgatgatcagggcgccgagcagattcgttatcgcagcctcaattcgtgcctgacctttgtctcgtcactgcacggcaaacaactgatcagcgtcgaagacctcaagcaccagggccagctgcacagcgtgcaacaggccatggtcgagtgccacggttcgcaatgcggcttttgcacccccggtttcgtgatgtcgttgttcgccctgcaaaagaacagcgaagcccccgacagccagaaagcccatgaagccctggccggcaacctgtgccgctgcaccggctaccgcccaatcctcgccgccgccgaacaggcctgctgcaacaagccccaggaccagttcgacagccgtgaggcgcagaccatcgcccgcctcaaagccatcgcgccgacccagactggagaactcaacagcggcgacaaacgctgcctggtgccgctcaccgtcgccgacctggccgacctctatgacgcctacccgcaagcccggctgttggccggcggcaccgacctggcgctggaagtgacccagttccaccgcaccctgccggtgatgatctacgtcggcaacattgaagaaatgaagcgcatcgacgacttcgacgaccgcctggaaatcggcgccgccaccgccctctccgactgctacaccgcgctgcaccatgcctacccggacttcggcgagttgctgcaccgcttcgcctccctgcagatccgcaaccagggcaccctgggcggcaatatcggcaatgcgtcaccgatcggtgattcgccgccgctgctgatcgccctcggcgcgcagattgtgctgtgcaagggcaatacgcgtcgcaccctggcgctcgaagactacttcatcgattaccgcgtcaccgcccggcaggacagcgagttcatcgagaaaatcatcgtgcccaaaggccacacgctgttccgcgcctacaaggtgtccaagcgcctggacgatgatatttccgccgtctgcgccgcgttcaacctcaagctcgacaacggtgtgatcagcgacgcccgcgtagcattcggcggtatggccgccacacccaaacgcgccaaaaactgtgaagcggtgttggtcggtgccacctggaacagcgccaccgtggaaaaggcctgcgccgccctggcccaggacttcaccccactgtcggacttccgcgcgagcaaggaataccgcctgctcagcgcgcagaacctgctgcgcaaatacttcatcgaactgcaaacgccgcacatcgagactcgggtgaccgcttatgtctaaccatcacgccgtcgttaaaacccaggccgaactcgccgcactgtttgcccaggacctcacttccggtgtgggccgcagcgtcaagcatgacagcgccgccaagcacgtatccggcgaagcgcagtacatcgatgaccgcctggaattccccaaccagttgcacctgtatgcacgcctgtccgaccgcgcccacgcccgcatcatcagcatcgacacggcgccctgctacgcgtttgaaggcgtgcgcattgtcatcacccatgaagacgtgccgggcctgaaagacatcggcccattgatgcccggcgaccccttgctggcgattgatacggtgcagttcgtcggccaagtggtgctggccgttgctgcgcgtgacctggaaaccgcacgcaaggccgccatggcggcggtgatcgaatacgaagacctggagccggtgctggacgtggtcgaggcgtttcgcaaaaagcacttcgtgctcgacagccacacccaccagcgcggcgattcggccggcgcactggccaccgcaaaaaaccgcatccagggtaccctgcacatcggcggccaggaacacttctacctggaaacccagatctcctcggtgatgcccaccgaagacggcggcatgatcgtctactgctccacgcagaaccccaccgaagtgcagaaactggtggccgaagtgctcgacgtgtcgatgaacaagatcgtggtcgacatgcgccgcatgggcggtggtttcggtggcaaggaaacccaggcggccagcccggcgtgcctgtgcgcggtggtggcacgcttgaccggccagccgaccaagatgcgcctgccgcgcgtggaagacatgctgatgaccggcaagcgccaccccttctacatcgaatatgacgtgggctttgacgacaacggccgcctgcacgggatcaacctggaactggcgggcaactgcggctgttcgccggacctgtccaactcgattgtcgaccgtgcgatgttccatgccgacaactcgtattacctgggcgatgcaacggtcaacggccatcgctgcaagactaacaccgcgtccaacacggcctatcgcggcttcggcggcccgcaaggcatggtcgccatcgaagaagtgatggacgccatcgcccgtcacctggccctcgacccactggccgtgcgcaaggccaactactacggcaagaccgaccgcaacgtcacccactactaccagaccgtcgagcacaacatgctcgaagagatgaccgccgaactggaagccagcagccaatacgctgagcgccgcgaagcgatccgcctgtacaacgcccacagcccgatcctgaaaaaaggcctggcgctgaccccggtgaaattcggtatctcgtttaccgcgagtttcctcaaccaggccggtgcgctgatccatatctacaccgacggcagcatccacctgaaccacggcggcaccgaaatgggccagggcttgaacaccaaggtcgcgcaggtggtggccgaggtgttccaggtggaaatcgaccgcgtacagatcaccgccaccaacaccgacaaggtgccgaacacctcgccgaccgccgcctccagcggtgccgacctgaatggcaaggccgcacagaacgccgccgaagccatcaagcagcgcctggtggaattcgccgcacgcaagtacgacgtgagcgaagcggatgtggagttccacaacggccatgtgcgcgtgcgcgagcagatcctgacgtttgaggcgttgatccaacaggcgtatttcgcccaggtctcgctgtcgagcacgggcttctacaagaccccgaaaatcttctacgaccgcagccagtcacggggacggccgttctactactacgcgttcggcgcggcgtgctgcgaagtaatcgtcgacactctgaccggcgaatacaagatgctgcgcaccgacatcctccatgacgtgggcgcgtcgctgaacccggccatcgacatcggccaggtcgaaggcggcttcatccagggcatgggctggctgaccatggaagaactggtgtggaacgccaagggcaagctgatgaccaacggcccggccagttacaagatcccggccgtggccgacatgccactggacctgcgggtgaagctggtggagaaccgcaagaacccggaagacacggtgttccattccaaggccgtgggcgagccgccgttcatgctcgggattgcttcgtggtgcgcgatcaaggatgccgtggcgagcctgggtgactatcgccatcaacccaggatcgatgcaccggccacgccggagcgggtgttgtgggggtgtgagcagatgcggcagttgactgcggcgaaggtggttgaggcggataccgagatggcctcgctctagaccgaggcgctgccatcgggggcacgccccctcccacactttgatctgtgaataccttcaaatgtgggagggggcttgcccccgatagcggcctgacagacaccacaagaggtgactatgaacaactggatcagcgccctcgccgacctgcagaaccaaggcgaaccctgcgtgctggtgaccatcatcgaagagctcggctccacgccgcgcaacgccggttcgaagatggtgatcagtgccacgcagaccttcgacaccatcggtggcgggcacctggaatacaaggcgatgcagatcgcccgcgacatgcttgtgcgcggccagcagaacacccatctggagcgcttcagcctcggcgcgagcctgggccagtgctgcggtggcgtgacggtgttgctgttcgaacccatgggccaggtgcaggcgcaaattgcggtgtttggcgccggccacgttggccgtgcgttggtcccgttgctggccagcctgccgtgccgggtgcgctggatcgattcccgtgatcaggagtttccagcacatatcccccagggcgtgcgtaaaatcgtcagcgaagagccggtcgacgaaattgccgacctgtcggcgggcagttactgcatcgtcatgacccacaatcatgcgctggacctggaactgaccgccgccctgctcaagcgcaatgacttcgcctacttcggcctgatcggttcgaagaccaagcgcgtcaagttcgaacaccgcctgcgcgatcgcggcttcgacgccgcgcagctgcaacgcatgcgctgccccatgggcctcaccgaggtgaagggcaagttaccggtggaaatcgccatctccatcgccggcgaaatcatcgccacctacaacgccaatttcggccagcacaccgccagcgccgaacccattgccaaactgctgccggcttcacgtcgcagccaagccatttgaaatgagatcaccatgcctttgactcgcaaagcctaccgtgccgccctgctgcacagcctcgccgaccccgctgaagtgggcatcgaagcctcctacgagtacttcgaagacggcctgctggtgatcgaaaacggtcaaatcagcgccatcggccgtgccagcgatttgctgccgaccttgcccgccgacatcgacatcacccattaccaggacgcgttgatcaccccgggcctgatcgacactcacatccacctgccgcagaccggcatggtcggcgcctatggcgagcagttgctcgactggctcaacacctacaccttcccgtgcgagagccagttcgccgacaaggcccacgccgaggaagtcgcggatattttcatcaaggaactgctgcgcaacggcaccaccaccgcgctggtgttcggcagcgtgcacccgcagtcagtgaattcattctttgaagcagcagaaaaactcgacctgcgcatgatcgccggcaaggtgatgatggaccgcaacgcgccggactacctgaccgacaccgctgaatccggctaccaggaaagcaaggcgctgatcgaacgctggcacggtaagggccgcctgcactatgcggtcacgccacgctttgcgccgaccagtacgccggagcaactggcactggccgggcaactgctgggcgaatacccggacctgtacatgcagacccacatcagcgagaacaagcaggaagtcgagtgggtgaaggagctgttcccggagcgcagtggctatctggatgtctacgaccactacaagttgctgggcgagcgttcggtgtttgcccatggcgtgcatttgtgtgatgacgagtgtgcacggttggcgcagacgggttcggcggtcgcattttgcccgacctcgaacttcttcctcggcagcggtttgttcaacctgccgatggccgaaaagcacaaattgaatgtgggcctgggcaccgatgtggggggcggcaccagtttctccctgctgcaaaccctgaacgaagcctacaaagtcatgcagttgcagggcgcacggttaagcccgttcaagtcgctgtacctggcgaccctgggcggtgcgcgggcgctgcggctggaagacaagatcggcacgctgcaaccgggcaccgatgcggacttcctggtgttggactacaacgccacgccactgatgagctatcgcctgaagcaggcgaagaacattgccgagacgttgtttgtgctgatgacactgggggatgatcgcacggtgttgcagacgtatgcggccgggcaattggtgcaccagcgctaattccataaacaccccaaaacaaatgtgggagggggcttgcccccgatagcagagtgtcagtctctggattaattgactgatgcaccgctatcgggggcaagccccctcccacattgttggtcgtatttacaactttatggacgagcgccccggcttcttggtctgcaacaaatgcgaaaacaccgcatgcaggtcatccgacgcgctctcttcatcgaggttgagcttgctgtcgatgtgatccatgtgatgcatcatcaaattcactgccaacgccgcatcccgtgcttcgatcgcatcgatcaactgggtgtgctcgtcataggaacagtgcgagcggttgccgctttcgtactgggcgatgatcaatgaggtctgggacaccaggctgcgctggaagctgatcagcggcgcgttcttcgccgcttcagccagcttgaggtggaactcgccggagaggcggataccggcaccgcggtcaccacgggaaaagctgtcgcgttcgtcgttgaccatctggcgcagttcggccagttgctcagccgtggcgtgttgcaccgccaactcagtgatcgcccgctccaccagacgccgcgccaggaacacctggcgtgcctcctcgacgcttgggctggccactaccgcaccgcgattgggccgcagcagcaccacgccttcatgggccaggcgcgacagcgcgcggcgaatgatggtgcggctgacgccgaagatttcgcccagtgcctcttcgctcaacttggtaccgggtgccaggcgttgttcgaggatcgcctcgaagatatgcgcgtagacgatatcgtcctgggttccgctgcgaccggccttgccggcacgcggttgtttcttgagaggttgcaactgttcgttcatgggcactcgggtttggagaacggcggcgaattaacggtaatacggcaacagcgtgtcgctggcaagtatcacctaaaaacagggcacattgtacacaacccactgcgccaacacactgtacggctgtttgcggcgtcggctgtattgcaatgagtcgctgcgtttgagtttaggcttgaatccgcaacttccctggtaaaaggaacacctgttcatgaccgacgccacccaagcgcctctgcgcccactggccgacacctctgcgtcggccgtcgtcgccggcttcatcgccatgatgaccggctacaccagctccctggtcctgatgttccaggcggggcaagccgccggtttgaccacggcgcagatttcctcatggatctgggcgatttccatcggcatggcggtgtgcagcatcggcctgtccctgcgctatcgcacccccatcacgattgcctggtcgacacccggtgccgcgctgctgatcaccagcctgggcggtgtgagttacggcgaggccatcggcgcgtacatcacctgcgcggtgctggtgacgatctgcggcttgaccggcagctttgaaaaactggtcaagcgcatccccgcgtcactcgcggctgctttgctggcggggattctgttcaagatcggcagcgagatcttcgtcgccgcacagcatcgcaccgggctggtgctggggatgttctttacctacctgatcatcaaacgcctgtcgccacgttatgcggtgctggccgcgctgctgatcggcaccgcgctgtcggggttgatggggctgctggacttcagcggtttccacctggaagtagcaacccccgtgtggaccacgccgcacttctcgctggcggcgaccatcagcatcggcatcccgttgttcgtggtagcgatgacctcgcagaacatgcccggcatcgccgtgctgcgggccgacggctacaacgtgccggcctcgccgctgatcaccgccacggggctggcgtccctggtgctgtctccgttcggctcccacggcatcaacctggccgccatcagcgcagcgatctgcaccgggcctcacgcccatgaagaccgcaacaagcgttataccgctgccgtgtggtgcggggtgttctacgggattgccggggtatttggcgcgaccttggcagcattgttcgcagccttgcccaaggaactggtgctgtcgattgcggccctggcgttgtttggctcgatcatcaatggcctgagcatcgccatgaatgagccgaaggaacgtgaagcggcgctgatcaccttcatggtcacggcgtctggcttgacgctgttttccatcggctcggcgttctgggggattgtggcgggggtgttgacgctgctgatcctgaactggcgtaaggcataaaaaaacggcgaccttcaggtcgccgttttttttcagtatcacttagccgcgttgatcggcttttccggataccacacgtccagcagcgggctgacttcagccttggtcagctcggaacggtttttcagccaggcttcaacggccgcacgttgctcttcggagaccgagccgcgcttctgcaggcaaaccagaccgtagtcatcgccgccgacgtagcccaggccattggcttccatggcttctttgatgaatgcttcgaggaaagcgtcgatagcttcttcactcaggccttcgttgaagtccaggttcagttcgaaacccagctcttgaaattcatcaacgcacagttttttgcgcagacgctgggaacggttagtcgccattggaacaatcctcataagtaataacgggcggcactttagcagtttaaggcggcgattgcccgattctctgggacaggcggcacaacgcctgtgaaaaaaacgccgaatacccgctatggttcagctacaagtggcttaaccttggggcataatgccgacactttcatgaccattgagggatttttcttatttacccctcgcctttttcaccctcctcagcagtagggttttacttcttatgatcaaatcgttgcgttccgtcttgtttgccggttttattctgccactggccttttccgtctccgctgcccccgtcaacaacaccctgccacccaatgttcaacaggcgctggccaaagccaaactgcaaaacactgcgctgtcgttggtgatgatccccctgaacggcccgggcacgcccactgtgttcaacgccgacgtgtcggtgaacccggcctccaccatgaagctggtcaccacttacgcggccctggaaatgctcggccccaaccaccagtggaaaaccgagttctacaccgatggcaccctcagcggtggcgtgttgcacggcaacctgtacctcaagggcggcggcgatcccaagctgaacatggaaaaactctggctgttgatgcgcgacctgcgcgccaacggcgtacagcaagtcactggcgacctggtgctggaccgcagtttcttcaatcagccgcagttgcccgaattcaatgacgacggcaacgacgaaaacaaaccattcctggtcaagccggacgcgctgctggtcaacctcaaggccttgcgcttcgtgacccgcaatgattcaggccgggtactggtgtcggtcgagccgccgattgccagcatccgcatcgacaaccaggtcaaggtctccaacgccaagcagtgcaccggcgacgtacgctacaacccggttaccgccgccgatggcagcgtgacggtaacggtcagcggccagttggccgacggctgcagctcgcagacctatctgtcgctgctggaccacgccacctataccgccggcgccgtccgggcgatctggaaggaactggggggcaccatccagggccgtgacatccaggcgccggtgcccaaggatgccaaggtactggcccgggcattttcgccggacctggcggaaatcatccgcgacatcaacaaatacagtaacaacaccatggcccagcagttgttcctgagcctgggtgcgcagttccgcaatgatgccgatggcgacgatgccaaggctgcacaacgcgtggtgcgccagtggctggcgaagaaaggcatcaccgcaccgcacctggtgatggagaacggctccggcctgtcccgtgccgaacgggtcagcgcccgcgagatggcggccatgctgcaagccgcgtggaaaagcccttacgcggcggaatacatcagctcgatgcccatcgccggcaccgacggcactatgcgcaaacgcctgaagaccaccgccatgcgcggcgaagcccacgtcaagaccggcaccctgaacaccgtgagagccatcgccgggttcagccgcgacaacaacggcaacacctgggccgtggtggcgatcctcaatgatccaaagccatggggtgcttcgtcggtgttagatcaagtgctgctggatttataccgccagccgaaggtcgccgcggcagcaccggtcctgtaggagcgagcttgctcgcgaaaaactcaagaacaccgcgtttatcctggatagacgcgatgggattgacgatcttcgcgagcaatctcgctcctacagaaaagcatcaagcgcgcaggcgctccgtctccacccgatccctgcccgcctgcttggccacatacacggccgagtcggcgcgcagcagcagcccgtcgataccttcatccacccgccaactggccacgccgaagctggcggtgacgatgcctaccggttccatcggcgcactgcgcagcgacgcccacaactccatcgccaggctgtaggcctgagcgccatcggtgtgcgggcacaacaccatgaattcctcgccgcccaggcggcagaacacatcggtacggcgcaggcgctggctgatgcgtttgcacaactcctgcaataccccatcgccgacggcgtgcccatgctggtcgttgatgcgcttgaagtgatcgatatccagcatgatcaccgacaaagcccccgaggtgcggttgagcctgaccatctcggccttgaggcgatcctggaaatagcggcggttatggatcccggtcagggagtcggtgatggagagcgcacgcagctcttcttccacccgtttcagatcggaaatgtccgacacgtagccgtgccacaacgtgccgcctgcgggtaactcttccggagtggcttcgccacgaatccagcgcaggccgcggtgcggcaacagcacccgatactcctcacgccaatgactcaactgcaacgccgacaagcggatcgaagcgcgtacccgctccgcatccagcgggtggatgcgctcgaagacctgcttggcatcctgctgcaatatgctgggctcgatttcatagatgtcgcgcatgccgtcgctggcgtagataaatttccagttgtcgtggggttctaacgtgaactggaagatgccgccgggcacatgggcgctgagtttcttgagcagccgatcccgggccgccaatgcctcgtaggcgcgcttttgttcggtaatgtcgaggtaaatcgccaggtgaccgatccacaaaccatggtcgtccagcaacacggtggccaacatgttcaccgtcagttggctgccatcctcacgtaccagggtccactcgcgggcttcgtgcaggttgtcggggctttccaccagcatcgcctggcttgccgggatgcgtttgcccagggccacactgaggctggcggagcgcgcttcgagttccgacgccaggtgcaggctttccagggtgtgcgtgcccatcacctgctcggccttgaaccccagcatctgctcggcaccggcattgaaggtattgatgacaccgcgcaggtcggtggcaatgatcgcgacctgcgttgcggcattcagcacactgcgcaattggccatgggcgccgcgtaactcctgctcgcgcaggcgcaactgcgccgtgcgctgctccaccagtttcaacgcgcgctggcgttggctgaccagcacatagagcagcgcgctgagcaacaggctgagcaggccgcccatggtcaggatcgtgctcaacgaggagtggttggcctggtcgaacacttggctcgggcgcagtttcagggcatacacatggtcgcccagcgtgaggcggcgcgctccgacaagatcaccgccggccacggcattgccggactcgaacagtacgcgctgttgcacgtcggaggtgtcgatgatctgcatcaccaggttgtcgcgatccggcttgggcaaaccgtcggccaccaactggcgcatgctgatcaccgccatgacatagccgtagggctcattctgggattggtcggaggtaggcaaatgactcaccggcgcgaccaatagaaccccggtggcataggccggttccacgcccaccagttgcatgggctgggacaccgccagcttgccggtcttttgcgcacgctcaagggccgaacgccgcaggggctgggccagcaagtcaaaaccgaggggtgcgcccagcaggctttgggtctggctgtacaagaccggcacgtattcatcgcgctcgggcgcaggggccaactcacccagtgaattcaactcacggataacaaaaggtgtgccgcgctgctcggacgcagttcgctcgaactgactgcgctgttcgcgatacacacggggcgcccaggagtaagcgcgcgcccgcagtagtaagggctgggcaaaaccgtcgaattcttcgcgggacacgtcatcggaattgacgaagaaacgccgcaggctgttcaggcgttgctcctgatcatcgaagcgttcctgcaggcgggtgtagcgctcgttgaccagcatctgaaagcgttggcgcacttgctgctgatagaggtcggcggcggcccaggcaacaacagccgtcaaggcaaacccggccagcaataccaccaatgccaccagccaagccgacgcctgttcactgataaagcctaggattttcgggcgaacggcttgcaacggcataggtaacactcacaacgccagcgtgcggggggtgtcacttggcttggccttaagttatagccatcgaccttgagtttgaccagcgtaaaaaagccgcaaacccggaataatccaggcttacggctcttttaacagcagggatcagcgcgcggtgattttccatgcccggtggatcttcgcattgcgtgcgaagtcggggtcgatggtcttgtcgctgatttcctcgaccgcatagcgctcgctgaggttgtcctccagtgcgaacttgcggaagttgttcgagaagtacaacacgccgcccggcgccaggcgcgccatggccaggtcgagcaactgcacgtggtcgcgctgcacgtcgaagataccttccatgcgcttggagttggagaaggtcggcggatcaatgaagatcaggtcgaactcatcgcggctcgcctccagccaggccatcacgtcaccctgctccaggcggttcttgtcagagaagccgttgagggacaagttgcgacgggcccagtccaggtaggttttggacagatcgacactggtggtgctgcgcgcgccgcccttggccgcgtgcacactggcggtggcggtgtagcaatacagattgaggaagcgcttgccggccgcttctttctggatacgcagacgcatcgggcggtggtcgaggaacaggccggtgtccaggtagtcggtgaggttgaccagcaacttcacgccgccttcgctgacctcagtgaacttgccctgggcgctctgccgctcgtactgcttggtgccgctttgacgctcgcggcgcttgactaccacgcggctcttgtcgatgttcagcgcctggggaatcgcggccagcgcatcgaacatccgcgcggaagctttttccgggtcgatggacttcggcgcggcgtattcctgcacgtggacccaatcgtgatacaggtcgatggccatggagtattccggcatgtcggcatcgtacacgcggtagcaatccacaccttcgcgcttggcccacttgcccagtagcttgaggttcttttgcaagcggttggcaaacatctgcccgccttcactcaggcgcgcctgctcgaccaccggggcaggagcgggtttgatcgggttaccgttcttgttgtactggcgctcttgcggctcggccggggcctggtcgtaggcagcttgctcacgttcggcctggcgctgttccggggtgcgacgctcgccggtgacaaactgatccgggttgaccttgatcagcagcaatttgcacggcaacgcaccgttccagaacgaatactgcttgtggctacggatgcccatgcgcttgcccagatccggcgcgccggtgaacaccgcggcttcccagcccatgcacgcctggcgcagacgctcgccgaggttctggtagaggtacaacaggctggcttcgtcacccaggcgctcgccatacggcgggttgcagatgaccaggcctttctggttctggtccgggcgcggctcgaaggtgccgacttcgccctggtacaccttgatccagtggctcaggcctgcacgctcaatgttgttgcgcgcaggctggatcagccgcggatcggcttcgtagccacggatccacagtggcggcttgttcatgccgatggcggcgcgttcagcggcctcggcatgcagtttcttccacagggccgggacgtgaccgagccaggtggtgaacccccacagctcgcggttcaggttgggggccatgtcagcagcgatcattgcgccttccaccaggaaggtgcccacgccgcacatcgggtcgctcagcgcgccgccttcagcggcgatgcgcggccagccggcacggatcaggatcgcggccgccaggttttccttcaacggtgccgcaccctgctgcaggcgataaccgcgctggtgcaggctgtgcccggacaggtccagggacaggatggcttcgccacggtccaggcgcaggtggatgcgcaggtccgggttgatcttgtcgatggacgggcgatcgccggtcggggtgcgcagcttgtcgacaatcgcatccttgaccttcagcgcgccgaagtgggtgttgtcgatgcccgaaccgtggccgctgaattcaaccgccagggtgccgtcggggaccatgtggtcggcccactcgatatccagcacgccgtggtagaggtcttcggcgtccttcatcgggaagcgcttgagcaccagcagcacgcggttggccaggcgtgaccagaggcacaggcggtaggcggtttccatgtcggccatgccgcgcacggccgaggtgtgctcgcgggcgtccgtaaggccaagcccgacggcttcctcgatcagcaggccttcgaggcccttggggcaggtgaggaagagttcaaaacggtccgacatggggcattccaggcttttcagcaataaatgaacgggcgacgcatcgccggctcggttttcaatcaagcacttttcttgaagagtgctcgcgtggcacgaatgtgccgtcccaccccggctgccgggccttagggcctttagtgacggggcagataaacaattggctgtaacaaaaagaaatattccgacccttcgtcgaataataactgactgcaacgggcggacattctcactaaaggattaaacccatcctctatgcagggtgcatcatagctggctttgcccaataaaaggggcgaaaaaccatcccagcttatggctatagcatcgttatcgttacgtgcttatgacaaaacgatcattgaatccatgtgacctattggttagaactcaacacaggttggcgccgtaacgacgccgacacatcggctcgccacgccggcagcgagcccaccaacggcagaaaaactctgcccggcctcggacgaggccgaaggatatcaagacagtcaacaagtgagggaaacaccctatgagaagacttaagcgtgatccgttggaaagagcatttttacgcggatatcaatatggcgttcatggcaaatcccgtgagctttgcccatttactctaccgtcggtacgccaagcctggatcaacggctggcgagaaggacgcggcgacaactgggacggtatgactggcactgcgggaatccacagactcaacgaacttcacgccgtcggctaatcaagggcaattaattccgacaccacctttggatttgtaacgacttaccatgcacgccccatccgggcggcgggcttcggcccagggggctccttttcaggggccctttttaatgggtcgctttcaggcttttggcaatgctgcgatggcatctaccgactggcgaatcagcgccgggcctttgtagatgaagccggaatacaactgcaccaggcttgcgcccgcggcaatcttctcggccgcatgcttgccttcggtgataccgccgaccgcgatgatcggcaagcgcccggccaactccgcagccagcaccttgacgatatgggtgctcttgtcacgcaccggcgcgcccgacaggccgcccgcttcgtcgccatgggccaggccttcgacacctacgcggctgagggtggtgttggtcgcgatgactgcgtccatccccgagtccaccagggcctgggccaccagcacggtttcctcgtcgctcatgtccggcgcgatcttgatcgccagcggcacgcgcttgccatggcgcacggccaggtcttcctggcgctggcgcaaggcttcgagcagttgcttgagggagtcaccgaattgcaggctgcgcaggcccggggtgttgggcgagctgacgttgaccgtaacatagctggcttgggcgtagaccttgtccaggcagatcaggtaatcgtccacggcgcgctcaaccggcgtatcgaagttcttgccgatattgatgcccaggatgcccttgtatttggcggcctgaacccgcgacagcaagtgatcgacgcccaggttgttgaagcccatgcgattgatgatcgcctcggcttccggcaggcggaagatacgtggcttggggttacccggctgcgggcgcggggtcacggtaccgatttcaacgaaaccgaaacccaactgcgcaaacccatcgatggccgcaccgttcttatccaggccagccgccaggccgaccgggttggggaagtcgagccccatcaccgagacaggcatgtttgccggtgacttgcataccaggccattgagccccaggcggccaccggcaccgatcaggtccagggacagatcgtgggaggtttccggggagagtttgaacaacagctggcgggccagggtatacatgggcgggctagactcggatggcggcgaaaggtgacggcgattatagccggggtcacgggtagcgcgcgaggcgtgaacctcaatcgtcagtggcggtgcgctaccaactgctcgtaatacgcccagattttctgggcatactgcatgcgcaacgcctgacgcgcaggcccggaacccgggcctgcgttgtaggagcctatcgccgtccagttgtagccaaagcgctggatgaactcggcgagaatcgaagcccctacctctaccgacaggcaaggctcattgagcaaccgctcctcggtaatacctcgctcgagcaggcgcggcaaatggctgctgttgatctgcatcaggccgatgtcccgagtaccattacggttcgcactgtttatcgcctgcgcacgaaagcccgactccaccgcagcgatcgcctgcagcagttcgggctcgatgtcgtagcggctggccgcctcctcccagcaataggccagcgcctgattgccggtcatcatcacccccaacaccaagcccttgctccagaacctaaccacgggttaccgctccatggcgggtctggccgcatgccgagcacacatctgccatgcggcccgacacatcgccctcgacctttaccgggcagatgaaccggtaccctcgaccataaatcgtcttgataaaccccttgtcggtggcaaggtacttgcgcagtgagtaaatgcagcgtgtcagcgactcttcggcgacttccccttgcggccaagccagctccagcaagcgatccttggtcatcaacacaccaccggacatcagcaacaatcgcagcaccagcccttccttgggcggcaactgaacatccgcgtcttcaccagtcaggcgaccatcgtcgtgcagggtccaacgcgcaaacaccagggaagtcgtcgtccctccatcatccatgacagccatgattacctcggcatccgactactgacattgaagtcctcatttgcattacgggttcaagtgcccctgtcacgactataaaaacctgcctcagggctcacgctaggacaaagcgcagacatcccgcgttttttggaaccacgctgtaagacgtttctctacccatcagcatcaggtagccatgcgtggtaaacctcgtgcagctcaacccccaaccggtcttccaactgcaccaactcacccaaggccagtaattgcccgttaacccgaacctccacgcaatggattatctccggcatcaacggcaacaccttgccgggcgcaaacgctgccaggcgccggcggctgatcaattgttcctgaagaagaatttccagatgcatcggctaacaccttgttcacggtgagacatcgcgctcaggccgtacaaacgcacgttgaacgcgctcgtattgtgctgctgtcaaaggcggcggccctgcccccccacccggccccagcgcctcgctgcccacggccctggcctgaatcacaaacagacgcacttgatccgggcgagcagccgcccgcccttctgcctctcgttgaaacgcgcccagccacagacgcctgccctggggcacacgcaccacactgttgacccccacctgcgccaccgccgtgtttttttcacgccgacccttctcactcctctggtgcccctcctcaatctcaaggcgcatttcgatctggttagcttcggaaaaacgcggcagtacgctgacctgagtgccatagcgcacaggtttccagtcaattcggtcgtttcccgggggcggtagataaaaggtatggctatcctgaaacaccgccggaacgttctcctgagtgagaatcacgggcagtgtcaccaccttcgcccgtcgacgacgctccaatgcagcgatcctggccatcacgcggttgtcatcccgaggcgcaaagattcgcgtggtcgacgtcttggcgtcttcgtccctgcccaggcccagcttctccagttcagtgcgctccacatccaccagccacagcgacacttcgatcggtcgcttgggtatgtcgagttccgccaccagtttctggatgaaactcacctgggccggcttgcccttgatcagcaggctgttgctgtccgggtaggcgatcacaccaaggctcttgtcggacagcaaccccttgtgctcgctggccagcagggtcttgatcatcgacgccatccccggcacggttaccgggttgtcacgtgtgccgtactgacggtccgccacatcggtgttgagcacttgaaccacaccaaaggcttgcgcgcccacacgcaagtcggctctttgccggtccatcaattgggccaggcgcatcacttggtcgacgtaattcggtgggccggacacatagaaagtgcgcgctccactttcacgcagggggtggcgtgactcatcgaggcccgagcggcgcatgaggccacgcaacttgtcgacggtaatatgccgcaaggtcaccgcagagctctttgcctcgtcggcatcgtagatatgcagcgcttgcccgtcgccgtgccagatcaacccctgttcgagcgcaagcgcttccagcgcctgttgcggcgcatcgaaatccagcgcagtgctgagacgtttgcgcgccaccgcctgactgacaacgatgggcacccccagcggctccgacagcgcagtgaacacggtatacaggctttcatcccgaacctggtgaagctcggccccagccagcgcacttaccagccacagcccggcaaaccacagccaacggtggaaccggaggcggggcatcgttaaaagggattcggcgtgcaccgtgagggttcctgggcagtctggcgttgagaaagcggcaatactgaaagcccgcccggtttcaatcttgatggaaagttgacggccagtcgggcctcaccgcccgtggcatgtgccttgctatgaactctgcatcagagcacgcgccaacggcggagcgcgctacggacaaaggcgtcgttacccgcattggcttacatcgccatctgagggaacgacgctttttttttgaaagaaaaggtaggtgttgatgaacgattcggtcggcaacagcccgatgaacgacccgctggcctgggtcaacggcagtgatgccccggaaaagagcagccttgacctgggtttcatggccctgagcgactgcgcctcgatggtcgtagcggccacccagggcttcgctcaaccctacggcctgaccctgaacctcaagcgccaatcgtcctgggccaacctgcgcgacaaactggtcagcggcgaactggacgccgcccacagcctgtacgggctgatctatgccgtgcacctgggcatcggcggtgtcgcgcccaccgacatggccgtgctgatggggctcaaccagaacggccagagcatcaacctgtcccacggtttgcagcaacaaggggtggtcactcctgaggcactggaccgccacgtgcaccaaagccgaacaaaactgaccttcgcccagacctttcccacaggtactcacgccatgtggctctattactggctggcgagccaaggtattcaccctttgcaggatgtggacagcgtggtggtcccgccgccgcaaatggttgcgcacctgcaagccggacgcatcgacgggttttgtgtcggtgagccctggtgcgccagcgcggtcaagcagaaccaagggtttaccctggcgaccagccaggcgatctggccggatcacccggaaaaagtcctcggctgcacccgtgcgtttgtcgaccagtaccccaataccgcgcgcgtgctggtgatggcgatcctggaggccagccggtttatcgaagaaagcaccgaaaaccgccgctccaccgcgcaattgctcagtggtcgcgagtacctcgacgctccgctcgactgcatcgaaccgcgcctgctgggagcctatgacgatggcctgggcaatcaatggcaggacccccacgccctgcgttttttcgctgatggtgcggtgaacctgccctacttgtccgacggcatgtggttcatgacccagttccggcgttggggcctgttgcgcgaggaccccgactacctcggcgttgcccgccaggtgcagcaactggcgctgtatcgccaggcggcaggtgcgctggggatcccggtgaaaacccaggacatgcgcagcagccaactgatcgacggcaaagtctgggacggttccaaccccaccgagtatgcccgcagcttccgcctgcatgccctggccgatgattccaaccgccaggccttgcgctgacaggagaacctccatgctgcgaatcctgttgatcaatgatactccacgcaaggtcggccgcctcaggacggcgctgatcgaggccggctttgacgtcatcgatgagtcaggcctgaccatcgacctgcccgcacgcgtcgaaacggtgcgcccggacgtgatcctgatcgataccgagtcaccgggccgtgatgtgatggagcaggtggtattggtcagtcgtgaccaaccccggcccatcgtgatgtttaccgacgaacatgacccgaacgtaatgcgccaggcgatcaagtccggcgtcagtgcctacatcgtcgaaggcatccaggcccagcgcctgcagccgatcctcgatgtggccatggcgcgcttcgaaagtgaccaggccttgcgcgcccagctccaggcacgtgaccagcagttggccgagcgtaagcgcatcgagctggccaagggcatgctgatgaaaatgaaggcctgcaacgaagaagaggcctacaccctgatgcgccgccaggccatgagccgccagcaaaagctgatccaggtggcggagcagattatcgccatgagcgagctgctcggctgatctggctcagctcttgctaagtattgcgcacaggtagccaacggcggttgcccctccccgacaaagacgtcgcacacccggtttgccttcgcaaacccggtggcggcgttttttcgttttggccttcttacaagactcccaaccgttgaggtgcgtgatgaaatcaagcttctggaaatccgggcacaccccgaccctgtttgccgcgttcctgtatttcgacctgagcttcatggtctggtacctgctggggccactggcggtgcagattgccgccgacctgcacctgaccacccaacaacgcggcctggtggtggctacaccgatcctggcgggtgcggtgctgcgtttcctgatgggcatgctggcggacaagctgtcgcccaagaccgccgggctgattggccaagtgattgtgatctgtgccctgttcggcgcctggaagctgggcatccacagttacgaacaagcgctgctgctggggctgttcctgggcatggccggtgcatcctttgctgttgcgttgccactggcctcccagtggtatccggcggaacaccaaggcaaagccatggggatcgcgggtgcgggcaactccggcacggtgttcgccgcgttgctggcgcctgtgttggcggccgcctttggctggagcaatgtgttcggcttcgctttgattccgctggtactgacgctgatcgtgtttgcctggctggcgcgcaatgcccctgaacggccaaaagccaaatccatggccgactacttcaaggccctgggcgaccgtgacagctggtggttcatgtttttctacagcgtgaccttcggcggctttatcggcctggcgagtgccctgcccggttacttcaacgaccagtacggcctgagcccggtgaccgccggctactacaccgcggcctgcgtgttcggcggcagcctgatgcgcccactgggcggcgcgctggcggaccgtttcggcgggattcgtacgttgctgggcatgtacagcgtggcggcgatctgcatcgcggcggtgggtttcaacctgccaagctcttatgcggcgctggccctgttcgtctgcaccatgcttggcctgggcgccggtaacggcgcggtgttccaactggtgccgcagcgtttccgccgtgagatcggcgtgatgaccggcctgatcggcatggccggcggcattggcggttttgccctggcggccggtatgggggcgatcaagcaaagcaccggcagctatcagatggcgctgtggctgttcgccagcctgggcgtattggcctggttcggcctgcatggcgtgaaacgtcgctggagaaccacctggggctcggccgccgtgacggcagcgcgggtctgatgagcctgcaactgagcatcgcccaggccaatgccatcggccctcggacggaaaaccaggacgcgctgcgggtggtgacccccgtggccgaactggcagcgagcaaaggctacttgtgcgccatcgccgatggtgtgagccagtgcgccgacggcggcctggccgcccgctcgaccttgcaggcgctggccctggattactacgccacgccgcagacctggagcgtggcccaggctctggagcgtttgctgctggcccagaatcgctggctgcaggccaatggcggtggccagccgttgctgaccaccctgagtgccctggtgtttcgcggccagcgcttcaccctggcgcatgtcggcgattgccgggcgtatcgctggctggatggggaactgcaacgcatcagtgaggatcacgtgtgggagcagccgggcatgcagcatgtactcaagcgtgccctcggcctggatcaacacctggtggtagattttctcgacggccagttgcgcgaaggcgaatgtttcctcctgctcagtgacggtgtgtgggcaaccctgggcgatcacagcatccgttcgattctgcgcgagcaaaccgacctggagctggcagtcaacaccctggtgaacgccgcgcacctggcgggcagccaggacaatgccagtgccctgctcgtccgcgtcgacgcccttggcgcagccaccctcggcgatgccctggtgcagttgcagcagtggccgctgccacccccgctgaaagccgggcaacactttgaaggctggcaggtgcaaagcgtattggcgcaaagccggcagtcattgttgtaccgggtgtgggatgcccagcagcaaccctggctgctgaaaaccctgccgctgagccgcgatgatgacggcgatgccggccaggccttgctcgcggaagaatggtttctacggcgagtcgccggccgggcgtttcctgaagtccatgccgccagcgggcgccagcatctgtactacgtgatgcgggaataccccggccagaccctggccgaactgttccagcagcacggaccattacccctggcgcaatggcagtcgatcgccgagcgcttgctgcgggcggtgggcatgttgcaccggcgacagatcttgcaccgcgatatcaagccggaaaacctgctgctgggggatgatggcgaactgcgtgtgctggatttcggcctggcgtactgcccaggcctgtcggaagaccgcgctcatgcgctgccgggcacgccaagctttatcgcgcccgaggcgttccatggcgaccgccctacggcccagcaggatttatatagtgtcggtgtcagcctctattacctgctgaccgggcactacccctacggtgaaatcgaagccttccaacggcccaggttcaaccagcccgtcagcgccagtcgctaccgccccgatctgccggattggctgcccctgagcctggaacgcgcagtggcggcccaaccggcgcatcgttacgaaactgccgaagaatggttgcgagtgctggaacaggcggaccgacaggaactgagcatccgccccaagcccttgctggagcgtgaacccttgaaggtctggcgcactctggcgctgctttcgttgttgatcaacctggtgctgttgtacgcactctttcaccgctgacgtcatccctggacgaggaacaatttatgaacgcaaaagtctggctggtgggcgcaggccccggtgacccggagctgttgaccctcaaggcggtacgcgccttgcgtgaggccgatgtggtgctgatcgatgacctggccaaccaggcagtactggaacactgcgtcggagcacgggtgatcaccgtgggcaaacgcggtggctgtcgctcgaccccgcaggactttatccatcgcctgatgctgcgctatgcacgccagggcaaatgcgtggtgcggctcaagggcggcgacccgtgtattttcgggcgtggcggtgaggaagccatgtggctgcgtgaaaggggcgtggaggtagagttggtcaacgggatcacggcggggctggcgggcgcgacaaattgtgcggttccgctgacgctgcgcggggtgagtcgtggcgtgaccctggtgacggcgcatacccaggacgacagccgcctgaattggcgagcactggccgagggcgggacaacgctggtggtgtacatgggcgtggcgaagctggaggagattcgccagcaactgctggacggcgggatggcggcggatatgccggtggcgatgatcgaaaacgcatcgctgcctcagcaacgggaatgccgcagtgaactgtcacgaatgtatgcagatgcgcaggcatttgccttgaaaagcccggccatcctggtaattggccatgtcgcagccccaggacaagtcgcttgcctcgctcaagccgccagcgcctgagacaaattacaggcgaaaaaaaagcccggcctgagccgggcttttttctaccactcagtaattactgagcttgagcttcaaccgacgcttctacgcgacggttaacagcacgaccagcttcagttgcgttgtcagcaactgggcgggattcgccgtaacctactgcggtgatacggctaggagcaacgccgtctttaaccaggacttgcttaacagcgtcagcacgacgctgggacagcttctggttgtaagcgtctggacctacggagtcagtgtgaccagcaacttctacgttggtagctgggtactgagccatgaagtcggccaggtttttcacgtcgccgtagctgttaggcttaacaaccgacttgtcgaagtcgaacttaacgtccagctcaacacgtacaacctgagcaactggagcttctggctctggagttggctctggagctggtgctggggtaggagctggagcagctgcgccagcgttaccgccgaagttcacgcccaggccgaccagtgcggagtagtcccacttgccgttgtccagaccgtagtcagcttcaacaccggcacgagcgtacaggttgttggtgaagtagtacttcacgccagtaccaacggtagcgaaggtagtctggtcgcgaccgctgtggccgtcagcctgaacgttggtacggctctggtggccgaaaccgccttctacgtatggacgcaggctgtctacgccagcttgaccgaagtgatactgggcaaccaggctgccggtatcgcctttgatcttctggttaccagtaccgtcgttcgaacgggtgtggttggtcttgtcgtaggacaggttcaaggacaggtcgtcggtcaggaagtaaccgatgcgagcgccaggattgaagccgtcttcgatgtgcttgacgctatcgttgtactgcttcttgtagaacagctcgccttcaactgcgccttggccttgtgccagaacgccgaaagaagtagcggcaataagagaaccaatggccaagcccaaggtgtttttcagtttcatccgttaaatccccatctggtgattgtaaagcagtcccacaaaccgggggacaactcggcgacaagtctaacagaacttgcctacacgtaagagatatttgccacgcactaagtttcagtctcgcccgcaaatttctcacgtaatttatcaagagcacgtttgtaacgcatttttgtagcactcaaacccatgtgcatgatgtcagcgatttcctggaattccagctctgcgacaaatcgtagcaccagaatttcccggtcaatcgggttcacatacaccaaccagcggtcaagtccgcccttctcctcgggtgccggcgccttttcttcagacgcctcctcaagggggtcaagactcaacgcgtccatcaagcgacgcttgcgccgttccttccgatactgcgtgatgcactcgttgtacgtgatgctgtacagccatgtcttgaacttcgatttgccctcgaagttcttcagcccgtacagcaccttgagcatcacttcctgacagacatcgtccgcatctctatcgttccctaaataccttgaacaaacgttgaacagagtgcgttgatatctgcgcatcaattcttcgtacgcgcgagttacgtgaaacagctccgtgtgcgagcgcgcgaccaactcctcatcagagagctcacgggggtcatagcgcgtggacagcgtttgggctttattcaaaacaagtcgtgccgacagtcaggtcaatgtccgccacagcccgatcagccgggttcgcggcggcgtacattagcagggtttgccgggttagcggctactgacctgctgttccaggagaatccgattggacaacgacaccagatcgccgtcatcggtcagcaccgtcgtcttgactgtgccgatctcctcgatttgcccttcgacctcgcccacacgcacctgttgccctacctgatacagctcacgcacatagattcccgcaagaatctggccggcaatttcccggcttcccaagcccatggccagcgcaacggccagaccaacggtaatcaaaacgatcacaatcacatggttgagcaggtcagtcttgacctccaactggctgatcgcgaccgaaatactgatgatgatcaccaggccctgggcaattcgccccaggccggcagcatagtccaaccccacgccttcggcggcgccgcgcaccagcccattggccagttgcgccagcaaaacgcctaccagcagcaccagcgcgccgccgaaaaccttcggcaaatacagcgccagcatgtcgagcgtagctgaaactcgctcaagtccaagggattgagccgcagaaaccaggaaaatcagcaaaacaaaccaataaacgatcttgccgatcaatgtcgagatcggcacttgcagcccggcacgtcccaacagcttggtcaggccggtgcccgccatcaggcggtcgaggcccagtttcgcgagcagtttggacagcagggtgtcgagcagcttggccacgacaaagcccagcagcaccagcaccaaggcaccaaacaggttgggaatgaaattcgccaccttggtccacaatgcggtcatcgcggtgaccaggctctgggtccagagatcaagttccatattcaatcagccttatcagcagtgcgagcaagaggtttacgacgggaaaccggtgagacatgggccgaaccgttgttcagggccatcatcaacgccggcacccagcgcccgagcagaccgaacagatcacccgcgcctacctgacggttggcggttttcagcacgcggcccaggcaggcatcgtcgtcccggttggacggcgaagcattgagcatgtcacgcaaagactgttcgaacggatcgtgcataaggacctctcgcaagtgatttaaaagacgagggttaaattcttggggtcacataggacccttcctacgttcagctcatattcaggtcaaacccagcgtaatcgtcgaaaaagccaccattgtccaagcgccaccgagaccatcaacaggcacgcaatcatgaatccataggggctggcagagaacggaatcccgcccacattgatacccagcaagccggtgagaaaactcatcggcaggaagatcccggtgatgatcccgaagcggtacatggtgcggttcatacgcacgctcaaacgccggtcttcggcctccagcacaagccccacgcgctctcgggtcaattcgagctcttccagataacgggtgaggctgttgttcaattcgttccaatagtcggcatcgtcgtcacagaaccacggcaatttgatgcgcgtgagctgggcaaaaatatcccgctgcggcgccaggaatcgcttgagcccggccgcccgtcgacggatctgcaaaacgctgccatgttccggggtataccgttcgtcggtatcgagtttttcttcctctatgtcgacgatttcggacaggtcggagaccagatcctgcactttattggtgaggtactgagccatataaaggatgagttcagaggcggtcttcggccccttgccgtccgccaattgcaccagcagttcgtcggtggcgcgcaacgggcgcaaccgcagggaaatcacccggctggccgcagcaaagatgcgcaccgagaccatgtcctccggttcagcaccggggttgaggttgacccctcgcaagaacagcagcaattgcgagtccggcagcggcaacaggcgcgggcgggtgttctcctccagcaacaggtcacaggcgaactcgctcaggccactggatttgcgcagccaggtctgggtttgcggatgactgcgatcccaatgcagccacaggctttcctggggctgcagttgcaagtcgtcgagctctgtccgtgcaatcgaacgcgcaccgcctttaccgtccagcaccagggcatgcaccaggccccactgcgcgttttcttcctcgaacatcctcaccccgtcggttattgcagtttattcaggcattttcagcgggctgggcgacacgatcacgccgttgttgtcggcatagatgtactcgcccggacggaacgtcaccccggcaaaggtgaccaccacgttcaagtcgccgatgccacgcttgtcggtcttcatcgggtggctggccagggcctgcacgcccaggtcggtctgggcaatgacgtcgacatcgcggatgcagccgtagatcaccagcccttcccagccgtttctcgcggccttctcggcgatcatgtcacccagcagcgcacggcgcagggaaccgccaccgtcaaccaccagcaccttgccggcgccaggctggtctgcctgttccttgaccagagagttatcttcgaagcatttgatggtgacaatctcgccaccgaaggaatctcggccgccgaagttgctgaacatcggctcaagcacctgcaccagctccgggtacgcgtcgcacaggtcgggggtcacgtaatggttcattgaacaattcctttccgtcaaagaagcgtctttcaaaagaagcgccagcccaagcaggtgcgaaacatcccatccacttcgccgcaacgcaatagccactgcgcgactgaatatgaccagaagcgtttaacgcgtcatatcttagccgcaaccacacacgagtgaaacgcccttggcagagccctgccctcaacccgtggccagcacctcgggctgcacgccgaacaagggtgtgagcgggtcgttcagccattgcaccaccagcggccacacttcggcctgggcagctttgctgacgagcatttcaacgtgcccgaaatcttcggtaaacccttgctggcggcccaggcacaggtattgacggtgctcggagccgacctgctcgaacagcttgcgacacgcccagtcagggtcctgatggtcgccggcggcactgaccgccaacaacggcacatccacgtctgccaggcctttccaccagtcgttcttgccttcgccaaagcggccaaacaggccgttccagcgcatggcttcgatcatcacacctgccggctcgtcctccgggccacgcttgaggcgcgagccagacacttcgccgaagcgtttcaagagcaagcgccccgtccactccaccggtggcagtttcaacggccagtgggtgcggctgacctggcagccaaacaacgctacagaagccacggctggcgcgccaaggtgcttcccgccaagcgctgcagccaggctggtgccgcccagggaatggccgatccagtggggaacctgcccgctttgctcgcgcacaaacgcgccaatggccggcaagtcgtagcgcgcatagtcagcgacgcggttgcgtgcgtagtcatgattgcgcttggacaaaccatgaccacgcatttccgggatccacacatcaaacccctgacgggccaggtaagcccccaggccgatgcctttgggcgaataccagaagcgccgattggaaaaactgccatgcaataaaataaccgcaatgccccggttttccgggacatcggccaggcccagacgggtaaccgccagctcgacggtgccgtcggggctgttaccgggtttgaggcggtaaacatcttcactcaggtcgccacgacgttcagcgctgatcagggcgacgggaaacagtttgctgctgctttgcataatgctcttgcacaaaaaagggcggcgtccggaaggagttccgccctgcacagataagaatgccggtcacccttatcgggtgaccggcacttttgacatgacgatcttaggcggacgcttggccttccgccaggaagaaccaggtttccagcacggaatcggggttcaacgagacactttcgatgccctgttccatcagccatttggccaggtcaggatggtcggaagggccttggccgcagatgccgatgtacttgccggccttgttacaggcctggatggcattggccagcagcttcttgaccgcagggtttcgctcgtcgaacaggtgggcgatgatcccggaatcgcggtccaggcccagggtcagctgggtcaggtcgttggagccgatggagaaaccgtcgaagaactccaggaactcttcggccaggatggcgttggacggcaattcgcacatcatgatcacgcgcaggccgttttcgccacgggacaggccgttttccgccagcaagtccaccacctggctcgcttcgcccagggtgcgcacgaacggcaccatgatctcgacgttggtcaggcccatctcgttgcgcacgcgtttgagggcgcggcattcgagttcgaagcaatcacggaacgcttcgctgatgtaacgcgaggcgccacggaagcccaacatcgggttttcttcttccggctcgtagagcttgccaccgatcaggttggcgtattcgttggacttgaagtccgacagacgcacgatgacctttttcgggtagaacgccgccgccagggtgctgatgccttccactagcttctcgacatagaagcccaccgggtcgttgtagccggcgatgcgcttgtcgacgctttccttgatgtccagcggcaggccgtcatagttcaacagggccttggggtgcacgccgatcatgcggttgatgatgaactccagccgggccaggcccacaccggcattcggcaattgcgcgaagtcgaaggcacggtcagggttgccgacgttcatcatgatcttgaacggcaggtccggcatggcgtcgatggagttctgcttgatgtcgaagcccagttcaccttcgaagatgaaaccggtgtcgccttcggcgcaggacacggtcacgccctggccgtccttgagcagttgggtggcgttgccgcaaccgactaccgcagggatccccagttcacgggcgatgatcgccgcgtggcaggtacgcccgccacggttggtgacgatggcgctggcgcgtttcatcaccggttcccagtccgggtcggtcatgtcggagaccagtacgtcacctggctggaccttgtccatctcggacacgtccttgatgatccgcaccttgccggcgccgatgcgctggccgatggcacggccttccaccagcacggtgccggtttctttgagcaggtagcgctccatgacattggccgacgtgcggcttttcacggtttccggacgggcttgcacgatgtacaacttgccgtcgtcaccgtccttggcccactcgatgtccatcgggcacttgtagtgcttttcgatgatcatcgcttgcttggccaactcgctgacttcagcgtcggtcaggcagaaacgcgcgcgttcggccttgtcgacttcaacggttttcaccgaacgaccggccttggcctcgtcgccgtagatcatcttgatagccttgctgcccaggttacggcgcaggatggccgggcggcccgcttcaagggtgcccttgtgtacgtagaattcgtcgggattgaccgcgccctgtacgacggtttcacccaggccgtaggcgccggtgatgaacaccacgtcacggaagcccgattcggtatcgagggtgaacatcacgccggcagtgccggtttccgaacgcaccatgcgctgcacaccggcagacaaggccaccagcttgtggtcgaaaccctggtgcacacggtaggaaatcgcgcgatcgttgaacagcgaggcgaacacttccttggctgcgcggatgacgttttccacgccgcgaatattcaggaaggtctcttgctggccggcgaaggaggcgtccggcaggtcttcggcggtggccgaggagcgcacggcgacggccatgtccgggttgccggccgacagggtggcgaaggcggtacggatctcttcgttgagcttctcggggaactcggcttccatgatccattggcggatctgggcgccggtcttggccagggcattgacgtcatcgacgtccagggcgtccagcgcggcgtggatctgagcgttgaggccgctcagttcgaggaaatcgcggtaagcctgggccgtggtggcgaaaccaccgggcaccgacacacctgcgcctgcaagattactgatcatctcgccgagggatgcgttcttgccccccacgtgctctacatcatggacgccgagcttatcgagggaaactacgtactctaccaaggtgatctctccactttctgtgttggaaaagctcaggacgccggctgctcagtaggagcattcgccagcgcttgtggcctggacctggaaaataagtgagaatgcggcccactgcgggacggcaaaatcgcgcctatcatatccaagattcgccatcagcttaaggcccagggctcaaatgaaacgatctgctttctttatctccgacggcaccggcatcacagccgaaacactgggtcaaagcctgctcgcgcagttcgaaaacattaccttcgccaaattcacgcggccgtacatcgacagcgtggataaagcgcgggccatggtacaacaaatcaatctggcggctgaaaaagacgggttccgcccgatcattttcgacaccatcgtcaatcaagacatccgtgagattctcgcaacgtcgaatggtttcatgatcgatattttctcgaccttcctggcgccattggagcaggagttgagtgaacactcctcctattcggtcggaaagtcccattccattgggcacaactccaactatatggagcgtatcgaggcggtgaacttcgccctcgacaacgacgacggcgcccgtacgcactactatgacaaggccgacctgatcctggtcggcgtgtcgcgctgcggcaaaacgcccacctgcctgtacatggccatgcagttcgggattcgcgcggccaattacccgctgaccgaagacgacatggagcacctgacgctgccggcggccctgcgcgcgcattcgcacaagctgttcgggctgaccatcgatccggaccgcctcaccgcaatccgcaatgagcgcaagcccaacagtcgctattcgagctatgcccagtgtgagtttgaagtgcgcgaagtagaaaatctgttccgccgggagaatattgcgcacatcaattccacgcatttctcggtggaagagatttccgcgaagattctggtggagaaaggcgtggagcgcaggttcaagtaagggtggcgcctggactggcctcttcgcgggcaagcccgctcccacagttgaccgagttccagctctggaatgcggtcaaaatgtgggagctggcttgcctgcgaagaacgataacgcggtgaacctgcctacagctgaaaccttcctcccccctgccccagcgccgtggccagcgcatcaaaccccgcccgcaacagctgatcatcccccgaggtgttgcagatactcgcccggatgaactgcggcaccgccgtctgccccacggcaaacgcctcggcggtggcgatcaggtaattattctgcttgagctcggcctcgatctccgacgcccgccatggctccggcacttctatccagaagtgcgggctgttgagatgggtgcggtattccaggcccgccagcaggtcgcggaccagcgccttgcggcggctgatctcgttgatctgctggcgcagcaggtattccgccgtgccgttctcgatccactgggtcgccagctcgagggtgacgggcgtggccatccagcaggtcgaacgcagggccgccgaaatacggctgaccagtgcgggcggcgcatgcacatagcccacacgcagcccggcggacaccgccttgctcaggctgctgatcaaaatcgtacgctcaggggcgaaatggctgaggggcggcggccgatcctccaccagtacaccgtgggcttcgtcctcaagaatcagcagattgtgttcgcgacagactttgaccaacgcttcgcgacgcgccaccgagagcacagcggtggtggggttctggatggtgggcgtgcagtacagcgctgaaatccggtgattacgacagacttcgtcaagcgcgctcggcagcacgccttcttcgtccatctccagaccgatcagccggatacccagcatgcgcgcggcggtgatcaggccgggataagtcagctgttcagtgaccaccgtatcgccagcccgcaacagtgccatcatcgagcagagcaagccgtgctggccgccgttgacgcagatgacctgctcggggatcggatgaaaatcgcgctgcaccagccattgcgcaccggcttcacggtagcgcggcaagccggcgtctggcgtgtaggcactgatgtcctggaggaacttggcgttggtcgacagggtttggaagctctgggccaggaacaccgtctcctgccccgggatgtgcatattccggctcatgtcgaagtattggcgcggttcttcgctgaagttgcgaaagccttcatcgcgctggcgctccatcccacgcttgcgcacgaaggtaccgtcccccacccgcgccaccaccaggcccaggcgttccagttcgccgtaggcacggctgatggtgccgatcgtgacgccaagattgtcggaaagtacccgatggggcggcagttttcttcctggctcaatcaagccttcaaggatgccccgttccatgacatcggacagtcgcttgtacttcacgccctgaccgttggacaacccctcacgcataattgacaccatgtcaatatttgttttgacagccatctttcgccctaatagtgtgcttttacgggttcaatcgccgaattttacaactcattacaagctcaatatagagttcaattccggctcagggaagcaataaacgatgccaatgtccgccgttctcgaaaacaccgccaagaccaaaacccaaaaacagtggctggccgggctgatcaccagtgtgatgttcctgatcgtgtgcctgagttggggcaccacctggctgggtatcaagattgccgtggagagcgtgccgccgctgacctccgccggcctgcgcttcctcatcgccttcccgctgttcctgtgttttgccatggtgcgccgcgaaccgatcctgtttccccgcgagagtcgctggttcttcgtgttcgtgaccctgtcctacttcagcgtgccctactacctgctcaactacggcgagatgcatgtctcgtccggcctcaccgcgctgctgttcagttgcatgccggtgttcatcctgattttctccgcgctgttcctgcgcgaacgcatctacttttcccaggtggtcggtatcggtatcggcttcggcagcctctacatgatcatcaagagccagggcctgcacctggaccacgccgagttcttcggggtactggcgattctgaccgccgcgatcatgcatgccttgtgctacgtcatcaccaagcagaaaggcagcgccatcagcgtaatcacctacaacaccctgcccatcggtattgccgggctgatgctgttcgtcgccgggctgtggtttgaagcgccgaccttcgaagccatcaccctacggtcgtggggtgcgctgttctacctggggctggtggcctcggtgggtgggttcatcgtgtatttcatgctgctcaagcgcttgagcccgatcatcctgtcgttcgtgtttatcatcttcccggtgttcgcggtgatcatcggcgcctggtacgaaggcgtgtcgatttcccgcgacctgatgctctactcggccatcctgctggccggctttgcgatcaccaagttgccggttgaaaaactcttggccaagaaaaattgaccctcctaccaccacgcgagagaaacatggacgtcctccgccccgaagccctggaacagatctacgcccacgccagccgcagctaccccgaggagtgctgtggttttgtcttcgccgacggcagcgtgtacctgggcagcaatatccagaacgagctgcaccgcaagaaccccgagatgtacccgcgcagcgccgccaacggctacacattctcggtggccgacaccctgctgctgagcaaggcgtttcgcagcgacaacccggtggtggtgatctatcactcccacccggatgtcggcgcctatttcagcgacgaagacgaggacaaggcgctgttcatgggtgaaccgatctaccccgtcagctacctggtggtcgacgttcgccagggccaggccctcggttccaagctgtttgcctgggatggcaagcatttcgcccttcaacctttcaacgacctgcacacggagttgtccatgaacgctgtctctttccccgacattctggttcgcgtggccaagctgccggaatcgaccctcgagggcgccggaacgacattgcgcgaagtcattgaaaacctctgcagcagccacccgcagttacgtccccacctgttccacgagaagaacaaccagctcaaggaacacttcctgtttaccgccgaggaagagttagtgggcgccgacgacccactaccggaaaaagcccggatcgaagtgctgctcgccacgtcgggcggcatggatgtcgacgcactgagcaatgaagaagtccagcgctacgtgcgccacatcaccctgcccggcgtcggccgcgaaggccagttgaacctcaagaaagccaaggtgctgatcatcggcaccggtggcctgggctcaccgatcagcctgtacctggcagcagccggcgtcggcaccctggggctggtggacttcgatgtggtggaaagcagcaacctgcaacgccagatcgtccacggcaacagcacgctgggcatgcccaaggtcgagtccgccaagcaacgtctgcaagaactcaaccgtcatatccagatcaatgcccacgacaccgccctgaatgccgataacgccctggaactggtgggcgcatacgacctggtgatcgacggcaccgacaatttcgacacccgctacctggtcaacgacgcctgcgtgcagctgggcaagccgttggtatacggcgccatctaccgcttcgacgggcagatcagcgtgctcaactataaaggtgggccctgctaccgctgcctgttccccagcgcgccgcccgccgaactggcgcccaattgcagcgccggtggcgtgatcggcgtgttgcccggtgtggtcgggatgatccaggccaccgaggccatcaagctgttgatcggcattggcgaaccgctgtctggccgcttgatgcgcttcgatgcgctggcgatgaagttcagcgagatccgcttcaagcgccgtgccgactgcccgtgctgctccgaactgcgccataacgaaagcgtggcaccggctgtctgtgcagacgccatgcccagccgaccgtccctggccgaggagcgctacataaagccccgtgtactcaagcaattgctcgaacacccgcgcagcgtcgatgtgttgctggacgtgcgtgatgccagcgaactggaggtatgcaaattgccaggtgtggtgcatatccccctggccgaactggacgatcagctcgaccgcctcagccgggacaacacccactacctgatctgctacgccggcacccgcgccgagcaagccgccagtaccttgctggcggcgggtttcgccaataccaaagtcctgcagggcggcatgaagcattgggttcgcgacgtcgaacccgacatgcccttgtattgagccgaggactgaatgatgttgcacaactcgattctcgaggtgatcggccaaacgccgatcgtgcgcctggcgcagttctccgaagacctcggcatcgaggtctacgccaagctcgaatccctcaacccgggcggcagccacaaggcgcgcatcgccctgggcatgatcctcgacgccgaacgccggggcgtgctgatccgtgactccgggcaaaccatcatcgagcccagcggcggcaataccggtatcggcctggtcatggccggcaatgtgctgggctacaaggtcgtgctggtgatccccgacaactacagccccgaaaaacagaagctgctgcgcctgtacggggccaaggtggtgctgtcggacagccgcctgggcaacaactcccacggcgaaaagtgcatggaattgcagctggaaaaccccagctacgtgatgctcaaccagcaacgcaacggcgccaacccacagacccatcgcgacaccaccgcaccggaaatcctgcgtgcgttcggcgagcgtcgcgccgactactttgtcagcggaatcggcaccggtgggcatatcaccgggattggcgaaaccttgaaagccgcctggccggggctgcgcgtcatgggggtggagccggaagaatgcgacctgctgaaaaaccagcatgcgccgcaccatatccagggcctgtcgatcggcctgatcccgagcatcctcaacctggacgtgatcgacggcatgctcaaggtctcgcgccaggactgcatcgacatgatgaaacgcatcatgcgcacggatgccatcagcctgggcttgtcttcggctgccaacatggtggccgtcgcccaactcgccccggaactgccgcccgaaacggtggtgctgaccatggtctacgacaatgccgacagctacctgcccagtttcgaataaacggtcttccaaccaatcagacgacgggggtgcctcaatgggtggctttatcgacatgcaacagttgcacgatgagttgctgactcacctcatcaagacgctcacgccggcacagatgaaacagctggagccgcatctggcgccgctggtacagaatgccgcccaggcggtggccgaggatttgatcgcctacgcctaccgcgacccggcatcccgtgggcgcggtgagctgatcctggagtcctacgcgtcgttcaaggcggtgctgtattaccggctggcgcacctggtgtggcatttccccgaccgcaccaacggcgtcttctcgcgtatcgccctcaagctgagcaaccagggcaaggtgctttccggcgccgagatccacccggcggcgcgcattggtcggcgctttgtactggatcacggctacggcaccgtgatcggcgaaacgtgtgagatcggcaacgactgctacatcctctgcggcgtgaccctgggcgcccgtggcatcgccaacaaccccgacggcaagcgccacccacgcctgggcaataacgtcgaggttggttccggcgcccgcgtgctcggctatgtactgatcggcgacaacgtgtttatcagtccctcctgtgtgatcacccaggatgtgcccgccggcaccaaagtgaaggtggtgaaccagatccaactgcaaaaaaacgacgagtcggaccacagcaattacctcggcgccttcgccctggatgagcgtctgcacgtggtcggcgagatcaatgcgagccacaaggtcacggtgctggacgccgacttccatcccttgcccgggctgatgctggagcccacggtgaaggagcgtcaccacctgcaatttcgcctgcaccgcatcgagtcgggcaaccccctgccacgcctgccgctgaacctgaaggtctgcggcccggaatttgaaatcaccctgctttccccgcctggcttgagtgcgatggtgcgttccctgttgcaagccagtccattgatcgttggaggttgaacatgtccgtgcacaccatggaaaccctggcgctgttcgacagcgcgccctaccagaacgccttcagcgcccgggtgattgccgtcagcgaacacggcgtcgccctggaacacacgttgttctaccccaccgggggcgggcagccaggcgacacggggcacctcaccctggcggacggtacgcgggtcgaagtgaccggcacagtgcgcgacccggtgcagcgctcgatcatctggcaccaggtggaacactgccccgagcaattgaccgccggagtgcaggtggacgccggcctcgactgggaccggcgctaccagcacatgaagatgcacacctgcctgcacctgttgtgctcgatcatcgacgcgccggtcaccggatgcagcatcagcgcagacaaaggccgcctggatttcgacctgccggaaatgaccctcgacaaagacagcatcacccgcgacctcaatgcgctgatcgaacaggcccacccggtgaaaaccctgtcgatgccggccaccgagtacgccaccctgctgcagatcacccgcacccaggcggtggcaccgccggtgattcagggtgcggtgcgggtgattgaaatcgccggcatcgatatccaaccgtgcggcggcacccatgtgctcaacaccgaagaaatcagccgggtgttctgcgagaagatcgagaagaagagcaaacacaaccgcagagtcatactgcgattcgagtgaacacggtgaactgtgggagccccccctcccacattcattgggtttccacagataaatacagggtgtctgctagatcacgaaaagatcaacaaaccggtttaccggcgttgcctcaagccgcgcctgatctttgcacaacgcaaaaatctcggcgctgcgctgcgcggtaaaccgtgtgaccaggttggccttgaacttgtcttccaataacggaatgccatccacccggcgacggcgatggccgatcgggtactccaccgccacctgctcggtgctgctcccatccttgaagaacacctgcaccgcgttggcgatggaacgcttgtcagcctccaggtattcgcggctgtagcgtgggtcttcgacgatgaccattttgtcccgcagcgcgtcgatgatcggatgggcggcgtggaattcgtcttcgtactgctccgccaccagattgccgaacgccaacggcacggcggtcatgtattgcaggcaatggtcacggtccgcggcgttggccagttggccgaccttggaaatgatgcgaatcgccgactcatgggtggtgatcacgatacgttcgatttcctgcaggcgatccttgaccaatggatgcaaggtcaccgccgcttcgcaggctgtttgcgcgtggaactcggcggggaagctgatcttgaacagcacgttttccatcacataggtgccgtagggctgggacaggctgaacccgcgcttgtcctgcggcttgagcgccaggtccttgttggtgtggctgaacaatacgtcgtagaacccccactgcggtgcgcttaatacaccggggatgcccatttcgccgcgcatcgcgatatccgccaggcgcacaccccggctggaggcatcacccgccgcccaggatttgcgcgaaccggcattcggcgcatgccggtacgtacgcaacgcctgcccatcgacaaaggcgtgggacaaggccgcgagcagttgctcacggttggcgcccatcagcttggcggtcaccgccgtggaggcgacttttaccagcagcacatggtcgaggccgacacggttgaacgagttttccagggcaatcacgccttggatttcgtgggccatgatcatcgcttccagcaccgcgcgcagggtcagcggtgtgtcaccgttggccacgcgcttttgcgacaggtggtcggccacggcgagaatgccgccgaggttgtccgacgggtggccccactcggcggcgagccaggtatcgttgtagtcgagccaacgtacgatgcagccgatgtcccacgccgccttgaccggatccagccggaacgaagtgcccggtacacgagcgccgaacggcaccaccgtgccctcgaccaccggccccaggtgcttggtgcactccgggaaacgcagggccagcaggccgcagcccagcgtgtccatcaggcagttgcgggcggtgtccaatgcggcctgggaatcgatccggtaagtgaggacatagtcggcgatgtcctgcaggacctggtcgtactcgggacggttgttctggtcgacgttggcgctcatggcagtactccaaaaaggggttggggtcagtcctcgggctcacggttattgagggcagatctaaggtgtccgccttggaataaagatcacctgtgggagggggcttgcccccgatggcagtggatcggtggatgaatctgtcgactggaacaccgctatcgggggcaagccccctcccacattggatagaggaggacctttagaaagcatcgccggggatgcgtacgaagccttccatcagtactcgggcgctgcggctcatgatggctttttttaccacccattcgccctccacctgggtggcttcagcgccgacgcgcaaggtaccggacggatgcccgaagcgcaccgcgttgcgctcaataccgcccgccgccaagttgaccaacgtcccggaaatcgccgccgccgtgccgattgccaccgccgccgtgcccatcatcgcgtggtgcaacttgcccatggacagcgcacgcaccagcaggtccacatcacccgccttgatcgccttgccactggacgccacgtagtcggccggcttggccacaaacgccaccttcggcgtgtgttggcgttgggcggcttcgtccaggtgctggatcaggcccatgcgcaacgcgccataagcccgcacggtctcgaacattgccagggctttcgggtcgctgttgatcgcgccttgcaactcggtgccggtgtagccgaggtcttcggcgttgataaagatggtcgggataccggcgttgatcagcgttgccttgaaggtgccgacgccaggcacttccaggtcgtccaccaggttgccggtggggaacatcgacccgccgccgccctcttcatccgctgccgggtccatgaattccaactgcacttcggcagccggaaaggtcacgccgtcgagttcgaagtcaccggtttcctgcacggcgccgtcagtgatcggcacatgggcgatgatggtcttgccgatattggcctgccatacacgcaccacagccacgccgttgtgggggacgcgggccgggtcgaccaggccggcgctgatggcaaaggaaccgaccgccgccgacaggttgccgcagttgccgctccaatcaacgaagggtttgtcgatggagacctggccgaacaggtaatccacgtcatgatcggcgcgagtgcttttggccaggatcacggttttgctggtgctcgaggtggcgccgcccatgccgtcgatttgcttgtcgtaggggtcggggctgccgattacccgtaacagcaaggcgtcacgcgcagcccccggcacctgcgccggttcgggcaggtccgtgaggctgaaaaacacacccttgctggtgccgccacgcatgtaggtggcagggatcttgatttgcgctacgtgtgccatggtgtcctctcaggctgtcgccgccgattccaggaagtcctgggcaaaacgctgcaacacgccgcccgcctcgtagatcgacacttcttcggcggtgtcgaggcggcaggtcaccggtacctcgacacgttcgccattcttgcggttgatcaccagggtcaactgcgcgcgtggagtgcgagcaccgaccacgtcataggtctcgctgccatcgatcttcagggtgtggcggtcggtgcccggcaggaactccagcggcagcacgcccatgcccaccaggttggtgcgatggatgcgctcgaacccttcggcggcaatcgcctccacaccggccaggcgcacgcccttggccgcccagtcgcgggacgagccctggccgtagtcggcgccggcaatgatgatcagcggctgcttacgctccatgtaggtctcgatggcttcccacatccgcgtgacctggccttccggctcgatgcgcgccagggaaccctgcttgaccttgccgttttccaccaccatttcgttgaacagtttcgggttggcgaaggttgcgcgctgcgcggtcaagtggtcgccacggtgggtcgcgtaggagttgaagtcgacttccggcaggcccattttcgccaggtattcgccggcggcgctgtcgagcatgatcgcgttggacggcgacaagtggtcggtggtgatgttgtccggcagcaccgccaatgggcgcatgcccttgagcggacgcgccccggccagcgcaccttcccagtacggcgggcgacggatataggtgctctgcgggcgccagtcgtacagcggcgcgactttcgggccggtgtcttcgtggatggcgaacatcgggatgtagacctggcggaactgctccggcttgaccgaggccttgaccactgcgtcgatctcttcgtcgctcggccagatgtcctgcaggcggatttccttgccgttggcgtcgaggccgagcacgtctttttcgatgtcgaagcggatggtgccggcaatcgcgtacgccaccaccagcggtggcgacgcgaggaatgcttgcttggcgtaggggtggattcgcccgtcgaagttgcggttgcccgacagcacagcggtggcgtacaggtcgcggtcgatgatttcctgctggatcaccgggtcgagtgcgccggacatgccgttgcaggtggtgcaggcaaacgccaccacaccgaaaccgagcttctccagctcatggcccaggcccgcttcttccaggtacatcgccacggttttcgagcccggcgccagggacgatttgacccacggcttgcgcgtcagacccaacttgttggcgttgcgcgccagcaggccggcggcgatcacgttgcgcgggttgctggtgttggtgcaactagtgatagcagcgatgatcaccgcgccgtcgggcatttgccccggcacttcatcccactggccggaaatacccttggacgccagatcgcgggtggcaacgcgagcatgcgggttgctcggcccggccatgttgcgcacgacgctggacagatcgaaggtcagcccacgctcgtactgcgcgcccttgaggtcatcggcccacagaccggtgtggcgagcatattgctccaccagggtgacttgctcgtcttcacggccggtgagtttcaggtaggcgatggtctgctggtcgatgtagaacatcgccgcggtcgcgccgtattccggggccatgttggagatggttgcacggtcgccaagggtcagtgccgaggcgccttcgccgaagaactccagccaggcgccgaccaccttctgttgacgcaggaactcggtcagcgccagcaccatgtcggtggcggtgatgccgggttgcagcttgcccgtcagttcaacgccgacgctttccggcaggcgcatccacgaggcgcgaccgagcatcacgctctcagcttccaggccgccgacaccgatggcgatcacgcccagggcatccacgtggggtgtgtggctgtcggtgccaacgcaggtatcggggaaagccacgccgtcgcgcacctggatcaccggggacattttctccaggttgatctggtgcatgatgccgttgccgggcgggatcacgtcgacgttcttgaaggccttcttggtccactcgatgaagtggaaacggtcttcgttgcgacggtcttcgatggcgcggtttttctcgaatgcgtccgggtcgaaaccgccggcttcgacggccagggagtggtcgacgatcagttgggtcggcaccaccgggttgacctgcgccgggtcaccgccttgcagggcgatggcatcacgcaggccggcgaggtcgaccagggcggtctggccgaggatgtcgtggcagacgacgcgggccgggaaccatgggaaatcgaggtcacgcttgcgttcgatcaactggctcagggatgcattgagggtggccgggtcacaacggcgcacgaggttttccgcaagcacgcgggaggtgtacggcaaggtggcgtaggcaccgggggtaattgcctcgacagccgcgcgggcgtcgaagaaatccaggcggctgccggggagcggtttgcgaaattcagtgttcatcgtcaggactcggtcacggtgataacaaagggaggacctgcaccgatccagaattgaaatgcggtcaaaatgtgggagggggcttgcccccgatagcggtgggtctgtgccagttgcatcaactgacagactgcaatcgggggcaagccccctcccacatttgatccggttaacatttcaggatcgtcggcattcccattcagcgacgttcgattggcacgaacttgcgctgctcaacgccggtgtattcggcgcttggacggatgatgcggttgttggcgcgctgttcgaacacatgcgccgcccagccagtcaggcgcgagcacacgaagatcggggtgaacagcttggtcgggatgcccatgaagtggtacgccgaggcatggtagaagtcggcgttggggaacagcttcttctgctcccacatggtcttgtcgatggcttcggagaccgggaacagcaccttgtcgcccacctcgtccgcaagttttttcgaccagcccttgatcacttcattacgcgggtcgctgtctttgtagatcgcgtggccgaagcccatgatcttgtccttgcgcgccagcatgccgagggtgccttcgaccgcttcttcagccgacgagaaacgctcgatcatctccatcgccgcctcgttggcgccgccgtgcagcgggccgcgcagcgagccgatggcggcggtgacgcaggaatacaggtcggacagggtcgaggcacacacccgggcggtgaacgtcgaggcgttgaattcgtgttccgcgtagaggatcagcgacacgttcatcaccttgacgtgcaactcgctgggcttcttgccgtgcagcaggtgcaggaagtggccgccgatgctcggctcgtcggtcacgcagtcgatgcgcttgccgtcgtggctgaagcggtaccagtagcacatgattgccgggaacgcggcgagcaggcggtcggtaacgtcgcgctgcacgctgaagtctttttccggctcgatattgcccaggaacgagcaaccggtgcgcatcacgtccatcgggtgggcgtcggcggggatacgctccaacacttccttcagcgcttgcggcaggtcgcgcagcttgcccagcctggcgctgtaggcggccagctcggtcttggtcggcaactcgccgtacagcagcaggtaggcgacttcttcaaattgcgcatcggcggccagttcgcgcacgtcgtagccgcgataggtcaggccggcacccgcctggcccacggtggacagtgcggtctgcccagccacctggccacgcaggccggccccactcaatacttttgcttcagccatgtctgttctccaatcttgaatttatttgggagtgcgccgggttattttttcgcggcaaacagcgcatcgagcttctgctcgaaggtgtggtagtcgatgcgatcgtaaagctccatgcgggtctgcatggtgtcgatcacgttctgttgggtaccgtcgcgacggatcgcggtgtagacattctcggcggccttgttcatggcgcggaaggccgagagcgggtacagcacgatggaaacatcggcagatttcaactgttcggtggtgtacagcggcgtggcgccgaactcggtgatgttggccaggatcggtgctttcacacgagaggcgaacagcttgtacatgtccagttcggtgatggcttccgggaagaccatgtcggcgccggcctcgatgcaggcggcggcacgttccagcgcggattccaggccttcgaccgccagcgcatcggtacgcgccatgatcacgaagctgtcatcggtgcgcgcatccacggcggccttgatacggtcgaccatttcctgctgggacacgatttccttgttcgggcgatgaccgcaacgcttggcgccgacctgatcttcgatatggatggcggccgcgccgaacttgatcatcgacttgacggtgcgcgccacattgaatgccgaggagccgaagccggtgtccacgtccaccagcagcggcaggtcgcacacgtcggtgatgcggcgtacgtcggtcagcacatcgtccaggccggtgatgcccaggtccggcacaccgagggagccagccgccaccccgccacccgacaggtagatcgccttgaacccggcgcgcttggccagcagtgcgtggttggcgttgatcgcacccaccacctgcagcgggtgttcactggcgaccgcgtcacggaaacgctggcctggagtcatcttgttattggaactcatcattcacctcgtgattggggagtgccgtccgggaagtgacgggcaatgttgcgtttggatgcgccgatatgccggcgcatcaacagttcggccagttcaccgtcgcgatcggcaatcgcgtcaagaatgcggtggtgctcggcaaaggcctggcgtggacgattgggggtggcggaaaactggatgcggtacatgcgcaccaattggtacagctcgccgcagagcatctgggtcagggtgcggttgccggcgccttggatgatccggtaatggaagtcgaagtcgccctcctgctggtaatagccgaggccggcctggaaggcttcgtcgcgctcgtgggtgtgcagcacctggcgcagttcttcgatttccgcgtcggtcatgcgctcggcggccaggcgacaggccatgccttcgagggattcgcggatttcgtagagttcgatcagttcgtcgtggctcagcgacaccacccgggcgccaacgtggggcacgcgcaccagcaggcgctggccttccaggcggtggatcgcctcacgcagcgggccacggctgatgccgtaggtgcgcgccagctctggctcggagatcttgctgccgggcgcgatctcccccttgacgatggcggcctggatacgccggaagacgttctcggacatggtctgggaatcgtcttgcgccaccactggggattccagctgatccagcatattgtcgacacctttaaaagcaatgccgcaaaaactagccaatcagcccaggatagtcaaagaataaatccatattgtcgacaatcgtctaataaccagggttgcacccaataggggcatggccgcctgccagcgctggcgccaaaaaagcatcatgttagaatgcccggcacttttgcctgacatcattggatgaaacggcgtacgagggagtttgcgcagcaatgccagtcgccttgaattgaacatcgcactgccgcctcgggatctatgagactcaaacccttccttctattaatgtgcctgttaaccgcacccggcctcggcgctgccgccgagaagaccgtctatggcctcaacgaatacgcccaactggccggtatcgacctggaagtcgcggccaaactggataccggggccaagaccgcctcgctcagtgcccgtgatatcaagcgcttcaagcgcaacggtgaatcctgggtgcgcttctacctggccatcgacaccgcccactcccaccccattgagcgtcccctggcccgcgtcagcaagatcaagcgccgcgccggtgactacgaccccgatgaggacaagaactacaccgcccgtccggtgattgccctggatatctgcatgggcaccgctttacgcagcatcgaagtgaacttgactgaccgcagcgctttccaatacccgctgctgatcggctccgaagcgctgaaacgctttgatgcgctggtcgaccccagtcttaaatacgcagcaggcaaacccgcctgcgccgccgacgctcataccgccgagtaaaccgaatgcgctctctgaccctgcacctgaagatcctgatcaccatcctggtggtcctgggtatttcggtcaccgcttatcagatcttcgtgctggggatccccgtcaccgaggacgccaccgacgacttgtggaacatcgacgccaaggtcgaattcgtcgccaacccgaaagacccggtgaagatccagatgttcgtgccgcccttgagccgcgacttcgtcagcctcaacgaaagcttcatctcgaataactatggggtaagcgtcaaccgcatcgacggcaaccgtaaggtcacctggtcggcccgccgtgccaagggcaaccagaccctgtattaccgcctggtgctgaccaagcgctacagcggcgaaaaagtcaaagtgaagggccccacgttccgcgacagcattgccgtggaaggcccggaaaaaatcgccgccgaagccctgctggcaccgatccgccagcactcggccgacgtcgagacgtttatcaccgaagcgatcaagcgcaccaacaacctcaacgacgacaacgtgaagctgctgctggcgggcgacccgtcgacgccgcacaaagccaagatcgtcgaattgctgctgtccatcgcccatgtgccggtggaaaaggtccacaccatccgcctggtcgccgaccaaccgcaaaccccggaactgtggctgcgtagcttcaacggcaatgactggttgtacttcaacccggaaaccggcgaacagggcctgcccgccgaccgcctgctgtggtggaccggtgatgaaaacctgatcaccgtcgacggcggcaagaaggccatggtgaccttcagcctgaacaacagcgagatgaacgcgattcgcctggccaagttgaccgacgagaacaccgacgccaacttcctcgaatactcgctgtacggcttgccgctgcaaacccagcagaccttcatgatcatggtgatgatcccgatcggcgtcctggtgatcctgatcctgcgcaacctgatcggcctgcagacattaggcacgttcaccccggtgctgatcgccctggcgttccgcgagacgcaactgggcttcgggattgtgctgttcacgattatcacggcgctggggctgtcgctcaggtcgtacctggaacacctgaaattgcagatgctgccgagactttcggtggtgctgaccttcgtggtggtgctgattgcggccatcagcctgttcagccataaattggggctggagcgcgggctgtcggtggcgctgttcccgatggtgattctgaccatgaccatcgaacgcctgtcgatcacctgggaagaacgcggcgccaaccatgcgctgaaagtggcgattggtacgctgttcgcggcgtccctggcacacctgatcatgagcgtgccggaactgatctacttcgtgttcaccttcccggcgatcctgctgatcctggtgggtttcatgctggccatgggtcgttatcgcggttaccgcctgaccgagttggtgcgtttcaaggccttcttgaaggctgaccagtaatgttcggcttctggaagacctggaaagccctggaagcgcgcgggatcatgggcatcaaccggcgtaacgccgactacgtgctcaagtacaacaagcgcagcctttacccgatcgtggatgacaagatcatcaccaaggaacgcgcgttggcggccggcatccacgtgccggaaatgtacggggtgatcagcaccgagaaggaaatcgacaagctcgacgagatcatcggtgggcgcagcgacttcgtgatcaagccggcccagggcgctggcggtgacggcatcctggtggtcgccgaccgctttgaagggcgctaccgcacggtgtccggcaagatcatcagccatgaagaaatcgagcatcagatttccagcatcctcaccggcctgtactccctgggcggccaccgtgatcgtgcgttgattgagtaccgcgtggtgcccgaccagatcttcaagagcatcagctacgaaggcgtgccggacatccgcatcatcgtgctgatgggctacccggtgatggccatgctgcgcttgccgacccgccagtcgggcggcaaggccaacctgcaccagggtgccattggcgtgggtgtggaccttgccaccggcctgaccctgcgcggcacctggctgaacaacatcattaccaaacaccccgacaccaccaatgcggtggatggcgtgcaattgcccaactgggatgggttcatgaagctcgccgccggctgctatgagttatgcgggctgggctatatcggcgtggacatggtgctggaccaggagaaaggccctttgatcctggagctgaatgcgcggcctgggctgaatatccagattgccaatgactgcggtttgaccctgcgtacccatgcagtggaagcgcggttggaggagctgaacgccgctggcgtgacggaaacggcggaggagcgggtgaagttcgttcaagaaatgtttgggcatattccaccggttgaaggctaaatgctgacctgctctgtacacccgctgccctatcgagccaaccccgccgagtatttcgcggcgattcgccatgcgcctggcgcggtgcttttggacagcggccggccggcggctgagcgtggccggtatgacctgctgagtgcctggccgaacgtcacgttgacagtatcgcccgatgaaagcggtggcgagttcttgcaacgtttgcggaaaaatctcacgcagctaggtgaagcaaatctgcccgccgggtatgagctgccgtttgccggcggactgatcggctacctgagctatgactttggtcggcatctggagcaaatgccgcatctggcaacggacgacctgcacctgccggatgcgcgctttggcctgtatgcctgggcgttgaccagtgatcaccaggcgcagaccagccagttggtgttccatcccacgctggccgagcacgaacggcagcggttgatcgcgttgttcagccatgacgttgccgacacatcggcgacgttcaaactccagggccccatgacgccggacctcaccgccgaggcttaccgtcaggccattgtgcgtatccaggattacatccaggccggcgactgttaccaggtcaacttcgcccagcgtttccgcgcgccgtgcagcggtgatccatgggtcgcttactgcgccctgcgcgaagcctgcccgacgccgttctccggattccagagcctgccggacgagggtgcggtgctgagcctgtcgccagagcgtttcgtgcacatcagcaaacgccaggtcgaaacccgcccgatcaaaggcacccgcccacgcggcctgacgcctcaggaagacgcggccaacgccgccgaactgctggccagccccaaggaccgcgccgaaaacctgatgattgtcgacctgctgcgcaacgacctcggtcgcacctgccgcaccggctcggtcagcgtgccggagttgttcagcctggaaagctatcccaacgtgcaccacttggtgagcagcgtcatcggcgagctggccgacggcaaggacgcgctcgacctgatcgccggcagcttcccaggcggctccatcaccggcgcgccgaagatccgcgcgatgcagatcatcgacgagctggagccgactcgccgtgggttgtactgcggttcgctggtgtatctggatgtgcgcggcgagatggacagttccatcgccattcgcagtttgctggtgaaggatggccaggtgtgctgctggggcggcggcgggattgtggcggactcgcagtgggaggcggagtatcaggagtcgctgacgaaggtgcgggtgttgttggagacactggacggtttgtagtgactgggctggcctcttcgcgggcaagcccgctcccacatttgactgcattctcatgatggaactcggtcaagtgtgggagctggcttgcctgcgaagaggccatcagccgcgctgaaagccttacaggctcaacgaccgattcgaggccttgatgaactctttcttcaaatcctcaaacgtatgcaccgccgggaactgcgggaattcgcggatcacgttttccggcgcatggaacagaatcccacggtcggcttcgcccagcatggtggtgtcgttgtaggagtcgccggcggcgatcacgcggtagtagagggtcttgaaggccaataccgactggcgcttggggtctttctggcgcagttggtaactgactacgcgatcggtttcgtcggtgatcaggcggtggcacagcagggtcgggaaacccagctggcgcatcagcggttgggagaactcatagaaggtatcggagaggatcaccacctggaagcgctcgcgcagccagttgacgaactcgatggcgccatccagcggcttgagggtggcgatcactgcctggatgtcggcaagcttgagcccgtgctcgtcaaggatgcgcaggcgctgcttcatcagtacgtcgtagtcgggaatgtcccgggtagtggcacgcagggattcaataccggttttttcagcgaaggcaatccagatttccggaaccagtaccccttccaggtcgagacaggcaatttccacaagacactcccttatagatgttgttggttgagcgagcaaaaacactgccgaactctagccattcacgctcgccgccgcaacgcagggcggtttttgataccatcgctcccctatagagcgctcagcgccactgacctgtaggaaccgtcctgatgaaccaagccttcgacgtcgctgaactcgccgcgacttatgccaacaaatccgcccaggacattctcaagctggcgttcagccagttcggtgatgacctgtggatttccttcagcggcgccgaggacgtggtgctggtggacatggcctggaagctgaacaaaaacgtcaaggtgttcagcctcgacaccggccgcctgcacccggagacctatcggtttatcgagcaggtgcgcgatttctacaagatcgacatcgagctgatctcgccagaccagagcaagctggagcccttcgtcaaagagaaaggcctgttcagcttttacaaggatggccacggcgaatgctgcggcgtgcgcaagatcgaaccgctgcgccgtaaactcgctggcgtcacagcctgggccaccggccagcgccgcgaccagagcccaggcacccgcagccaggtggcggcgctggaaatcgacacggccttctcgacaccggaacgcaccctgtacaagttcaacccgctggcacagatgaccagtgaggaagtctggggttacatccgcatgctggagctgccttacaacagcctgcatgagcgcggcttcatcagcatcggctgcgagccctgcacccgcccggtgttgccgaaccagcatgagcgtgaaggtcgctggtggtgggaggaagccacgcagaaggaatgcgggttgcatgcggggaatatcatcagcaaggcctgaagttgcgctgtaaaaaatgtggaagggggcttgcccccgatagcggtggtcagccaggtcaatagtgactgacactccgcaatcgggggcaagccccctcccacatttgatttgtgttggccactgaacgtgtacacacacatgtaactatcggtgccatttatgtgtgcaatccatcttgtggcgcaccattacgtaacacctctccccacctgtcttttgtctttgcaaatcgcccggttcccaccaaaaaataaatagctgttcaaacggtcaatttatatcgctttaaattcaactagttattccatgcacctaaaaaaacgaaattacccaaggttttcatagatcaaaaactggcacgcaagtggcttaaggtgaaatacgctttgtatacaataaatacaaaacctacatacactttgccatctgcggcctggctgccgatgtgctggagcctgccggaatgcgtacaagcctctcgaataacatcgcactggatctgccctcctccctgaagcccgaagccatcgagcccagccctctggtgctgagcccacgcctgcacaacaaggacctggcgcccaccaaggttgaaggccggcgctggggtcgctatagcatctttgcgctgtggaccaatgacgtacacaacatcgccaactactcgtttgccattggcttgtatgcactgggcctgggcggctggcagattctgttgtccctcggtatcggtgcggcactggtgtatttcttcatgaacctgtcgggctacatggggcaaaagaccggtgtgccgtttcccgtgatcagccgtatcagcttcggcattcatggcgcgcagattccggcgttgatccgcgcggtgattgcgattgcctggttcggcatccagacctacctggcctcggtggtgttccgtgtgttgctgacggcgattcatcccggctttgccgaatacgaccacaattcgatcctgggcctgtcgtccctcggctgggtgtgtttcgtggcgatctggctggtgcaactggtgatcctggcctacggcatggaaatggtacgccgctacgaaggcttcgccggaccggtgattttgctcaccgtggcgtcgttggccggttggatgtatttccagaccggcgggactatcgcctggtcgatccgcgagccgctgagcggcggcgagatgtggcgcaatatctttgctggtggcgcgctgtggctggcgatctacggcacgctgatcctcaatttctgtgacttcgcccgctcctcgccctgccgcaagaccattcaggtcggtaacttctggggcctgccggtgaatatcctggtgtttgccgcgatcaccgtgctgctgtgcggcgggcagttccagctcaatggccgggtcatcgaaagcccgaccgaaatcatcgccgccatcccgaataccttcttcctggtgctgggctgcctggcgttcctgatcgtcaccgtggcggtgaacatcatggccaactttgtcgcaccggcctttgtactgagcaacctggcgcccaagtacctgaacttccgtcgcgccgggttgatcagcgccaccgtggcggtgctgatcctgccgtggaacctctacaacagcccgctggtgatcgtgtacttcctctccggcctgggcgcgctgctggggccgctgtatggggtgatcatggtcgattactggttgatccgcaaaggccaggtcgacgtgccgcagttgtacagcgaagacccaagcggcgcttattactacagccgtggagtcaatttgcgtgcggtggcggcgtttgttcctgcggcggtgatcgccattctcctggctttgttgccgggtttcgccagcgtctcaccgttttcctggatgtttggcgccggtattgcagggctgctgtacttgctgatcgccaagcgccagccgttctacgccgatgtcagcggcgaaagcattgccgtcgataacgtcagtcattaatcaaggaccttccatgcgtatcctcgtggtcaacgtcaacaccaccgaatccatcactgaaaccatcgcccagcaggcgcgcgccgtggctgcgccgggcaccgagattgtcgggctcacgccgtacttcggcgccgaatcggtggagggcaactttgaaagctatctggcggccatcgcggtgatggaccgggtgatggcctatgaccagccgtttgatgcagtgatccaggccgggtacggcgagcatggtcgtgaaggcttgcaggaattgctcaacgtgccggtggtggacatcaccgaagccgccgccagcaccgcgatgttcctgggtcacgcctactcggtagtgaccaccctggaccgcacggtgccgctgatcgaagaccgcctgaaactggccggcctgtaccagcgctgcgcctcggtacgcgccagtggcatggcggtgctggagctggaagaaaacccgttggcggcgatggaagccatcgtgcgccaggccgagttggccatcagcgaagacaaggccgaggtgatctgcctgggttgtggcggcatggccgggctggatgagcagattcgccagcgcaccggcgtgccggtggtggatggggtgacggcggcggtgaccattgccgagtcgctggtgcggttgggactgtcgacgtcgaagatcaggacttatgcgacgccgagggcgaaaaaagtcatcggttggccgcgctgaagcgttggttcaactgctgctcggcgaattgctcaatgatgaaatccacaaacgcgcgagtcttgccgggcagcagtttgtgttcggcgtagtaaatggagatgttgccgtcgtcgacgtaccagtcgggcagcacccgcaccaccgcgccgctgtccaggaatggcacggccataggcatgctcaccaaggcgatgcccaggccttgggcgctggcgcagcaggcggcttcggagtcgctcatggtcatgctcggcttgagtaccagcgggcggtgttcacgctcgatactggtcaattgccaggaccgtatacgaccggtctgcggtgaacggatgaggatcccgtggcaacgcgtcagatcttcgggcacccgcaccgaaggacgctgcgccaggtagtccggggacgccaccagcactcgatgggccggcgtcaacttgcgcgccaccaccccctgaggcagctcgaagccaccaccaatggcggcatcgaagccctggccgatcaggtcgacctggcggttatcgaaatgccagtccgggctgatgtccgggaagcgacgcataaacgcgcccaacagtggcatcacgtagcgattgccaaatactgtgcccatgctcactttcaaggtgcccaccggccgcccttcggcgctggccaggttggccacggcgttctggatggtggtgaggctgccgctgacctcttcgaggaacagcttgccggcttcagtgagggtgaggcgccgagtgctgcgctggaacaggcgtacacccaagcgcgcctctagcttggcgacacttttgcccaccgccgccggtgtcaggctcaggtgccgcgccgcttcggcaaagctgccaccttcggcgctgcgcacgaaacattcgatactgccaaagccttccatatcgaccactctaaacttttggtttacacagactatagcaatcctggtctaccgggaggggctggcgaggtcgatactcggttccaacaacaaggcatcccgccttgaacagcttggagatcgacatgaccacacaaaacctcagcggcaaagtcgccttgattcaaggcggttctcgcggcatcggcgccgccatcgtcaaacgtcttgccgcgcagggcgcagccgttgcctttacctacgtcagctcggccgccaaggccgaagaactgcagaacagcgtgatcagcgaaggcggcaaagccctggcgatccatgccgacagcgccgatgccgatgcgatacgcaatgcggtcaacgccaccgtcgaagcctttgggcgtctggatatactggtgaacaacgccggcgtgctggccatcgcgccgctggaggatttcaagctggaagactttgaccagaccctggcaatcaacgtacgcagcgtgtttatcgcaacccaggaagcggccaagcatatgggtgaaggcggccgcgtgatcaatatcggcagcaccaacgccgagcgcatgccgtttggtggcggtggcccgtatgcgatgagcaaggcggcgctggtggggttgaccaaaggcttggcgcgggatctggggccacgtgggatcaccatcaataacgtgcagcctgggccggtggacaccgatatgaacccggccaacagtgattttgccgagagtttgattgggttgatggcggtcgggcggtatgggcatgtggaagagattgccagttttgtggcttacctcgctgggccggaagcgggctacatcaccggtgcaagtctgaccatcgatggtggcttcagcgcctaggatttgcggaacaccgcaaatcaaatgtgggaggggcaagtcgaatcgtcgcaccgcccctcccacatttttaaccgcgatcaatcaggctcgaggtggcaggccgtaggccgccaggtcgaagtccgcgagcttgcggatgatctggtcggcgtggtgatacttgctgtcggccatggcttcgtccggcacggcgatggcggtcatatgggcggctttcgcagcagtgacgccgaagggtgagtcttcgaacaccaggcaatcctgcggtgccacgcccaagcggcgggcggcagtgaggaagatgtctggcgcgggtttggcggcgcccacttccgggtcgtcagcggtgacgatggtgtcgaacaggccaaaccattcgcggtgcaaggtggtcttgtgaccaaacgaattgcgcgacgaactggtgcccacggcaatcgggatattgtgcgccttcaagtgccgcaccaaggcttcggcgccgggcatgcccaaggccttggggaaacgctcgctcatcagcggttcccggatcttgaggaattcggccggtgtgatcggcaggtccagcgccttcaccacgtagtccgccaggtcctgggcaccgcgcccgataatgtgctgcttgatgccccagtcgtaggtgcggccgtagcgctcggcgatgatttgcgtgacttcggtatagatgccttcagtgtccagcaacaacccgtccatatcgaaaatcacggccttgatcggaccgactgcggtacgcggtgcattcatcacgacaacccaagggaaagactaaaaggattcagcacaatagcggtgcgggtcccatgcaggcaaccgccatgactttgtatcgattcgattcccgagttgatggcccttcatatcagtgcctcataactggcaacagttataccggtcggtgtgtgcggcgaccgtctacggtttgtgagggcagcgcgaaccgccactggccggcgtctgaaaatatcgcttgataaccttataaaagacttattaatcttccaatgaactccatccactggactagaaaatccgtaaagcaactgcttcggttgcatacgtatcatcagcaacaggtacgcgatgcggtgtcagcgctcgagcgcatgcccgaggcagccaacgtcaaggcattggtcaattacccccatggttatcgcttgcgcgtgggtaattaccgagtccttttcgattgggatcgcgatatccatgtggtcagcattgaagaggtcaagaagcgtgacgagcgaacctactgccgtacagatcatccacaatacggagggcaagccagcctttgtggtgattccctatgaacattatctggcccggcagaacgatccaaatctgattccccatgcggtggtaagccgcctggtggatggggcaacccctatccgtgcatggcgcgaacacctgaacctgacccaggaagaagttgccaaacgcctgggcatttcccaatccgcatttgcccaacaagagtcggtgaataaacctcgccgtgcaacgcgggaaaaaattgccaaggcgttcggcatcaacgccagtcaactggagctatagagcgttacgctggaaatctgccccctcagtcccctcacttaagggcttccacctggatccgcgcatgggccagtgccgtagaggccgatgctacaggccctttagtgccaaacttcacactgcccgaggcaggcaacccatgccggccagggtcgtctccaccgcttcatccagcggcgtgcaaggttcaacgcccaataccgcaaccagccgcgtgttatcgagcagcacaggggtttgccacaggtaacgcatctccagcatttcacggaaggtgacgacaaaaggcgaagctattttcagcagccaccaggggaacatcctgacgacaggctgttgccccgtcctacgcagcaccacgcactggatcgccctgctcacctgtgtgccatccgtgtccacctgccccgccatatgaaaacgcgcgaacgcctccagggtttcacggcgctcgagcagttcaaccatcgtacgcgccacatcgggcaggtacgcccactgatgggcaacacctggcgcccccggatagttgacgctgcgcacgaggttgccaggtttgaccaagccctgggaaaaccagctgttggccgcctgcgcgccgaaaaaatcaccggcgcgcacgatcagcacccgcgccccgttgcctgaagcttcgtataaccgttgctccagttgcacacggatcgcgcccttgcgggtttgcgggtgttgaggggagtcttcgtgcagtacgggaaacgcgtctggcccaaagttgtagacggtaccgggcaacacaatggtggcgccttcagcaacggccgccgcaatggtgttgtcgatcatcggcagcacccgctcggcccagtgccgatagcccggcgggttgaccgcgtgcacgatcacttcacagcctcgggctgcggcaagtacgtcatcgcggttgagtgcatcaccctcaagccagtcaaatgcggcgttctggccacgggccttgtcggcatcacgggtcaacgcgcgcacctgccaacccgccgccagcagttgccgtgcgacttcgccaccaatgccaccggttgcacccaacaccaatactgtattcatcacacgctcccacgctggttgatggggacattttctgcgcggccaggctatagaggaattgtcgaagaccattcaggcgctatacatttatgcatggcaacgaatattggttgggagctttaccggtcgttccttggcgtgttccgggaaggatcgctgtcgggggccgcacggcaactcggcattacacagcccacggtcggccggcacatcgccgcgctggaaacggcgctgggcgtggtgctgtttacccgttcacccaccggcttgttgcccacggccgtggcccacacgctgcgcgcccacgccgaaaccatggagcgcacagcggcggcacttgagcgtgcagcgtctgcccagggtgatgaagtgcgcggcgtggtgcgcgtgtccgccagtgaagtggtcggcgtggaagtgctgccgccgatcctcacgcaagtgcgccgggcacacccgcacctcaaggtcgaactggtgctgacaaaccgcctgagcgacctgttgcaactagaagccgacatcgccgtgcgcatggtccgccccagccaggagcaactgctggcgcgacgcatcggcctgatcgaagtaggcctgcacgcccgcgacgattacttgcagcaacacggcacgcccctgttgatgcaagacctggccggtcactcagtgatcggtttcgaccaggaaaacgcatttatccgcagcctggccatcaagggtttcgagcgcagcgcctttgccctcagcagcgacagcgacctagcccaactggcactgatccgtgccggtgccggtatcggcgggtgccaggtccaattggccaagcgcgatccccgcctgcgccgggtcctgccggaaggctttgcactcaagttggacacctgggtgaccatgcacgaagacctgcgcagcagcccgcgctgccgcgtgatgttcgacgcgcttgtcgaaggtttgcagcgttacgtacaggattgagacagcttcactggtgaagaatcagactccctcagtcccttcacagacgcccccatgtccgaagccttcgaagtccccagcccccacgaaaaacacatcgaacacaccaccgaacatgcccacggccgcggtgacaacttcgccagccgcatcgccgtgatgaccgcgctgatggccacccttggcgccatgctcagctaccaggccggctccaccgaaagcgaagcggcaatggacaagaacaacgccgccatcttcaagaccgaggccgccaaccagtggaactactaccaggccaaatccagccggcaaaacctggcagaactggccacccacatccccggtgtggatgcggtgcattacaaggaagagatcgagcgctatagaagccagaaggaagacgtgcgcaaacaggccgaaaagcttgaggccacctcaaaggaatgggatgaaaagtcggaacaggcgctgcaccagcaccatcgctgggcccaagcgatgaccgcgattcagatcgcgatttcgttggcggcgatcaccttgctgaccaggcgggaatggttgaagcgcctgtcgtatacggcaggcggagcagccgtgatattggggagcctggcctggctgcatttataaaaaatccccttgggcgccagagccttaccgctacatagtaaacagcataacgaaacccgaggagataccggtgtccgcacaacccaaggaagctgtgggcgccgcctacagcatcgacgccatgcgctacgcccaaggcatgacctggcaagccatcgaacacctcgcccaacgcatccgccccggcatgctcgaatccgaagcccgcgagctgggcaaacacgtcctcgccgaactcgacatgcagcgcatctggcacccactgctggtgcgctttggcgccaacaccctcaagaccttcaaacaacgctccgacggcgatccgatgctgggcgacaacgacatcttcttcatcgacatgggcgccctctggcagggtcacgaaggtgacgccggcgccaccttcgccatcggcaacgacccggacatgcacgcctgcgccagcgccgccaaagcactgttcgaccgcgtgcaagcccgctggaaaaacgaccaggtcgtcggccaggagctttaccgctacgccgaagcacaagccctggccatgggctggcaactgaacctcgacatcaagggccaccgcgtctgcgacttcccccacgccatccaccgcggcggcgacctgggtgacttcgagcactacccgaacgccggcctgtggatcctggaaatccagatcgcccatccgagcaaaccctacggggctttctacgaagacctcctcgcttaaggaacgcaaatgaaccgcgccaccgaacaccccgtgctgttgttttcctacggcacgttgcaggacaaatccgtacaactggccaacttcggccgggaactggcgggccagcaggatgcgatgctgggctattcacagagctgggtggagatcaccgaccctgaggtgctggcaagcagtggcaagacgcatcatccgattgtggcgccgagcgctgaggcaggcgccaggattgaggggatggcgttccggattacggagcaggagctggcggcggcggatgcgtatgaagtggcggactacaagcgggtggaggtggggttggcttcggggttgagggcttgggtgtatgtgcgggcgtgatatgaacaagggcggctgaattggccgccctttcgagagagtaccgagcctacttgcacaccattgacacttgagtttggtgctcatactcccaccctctacacgccaaccctacgtgcttgggaatcaaagcagcaccactgctataggccgtgatagtcctacgtgagaagcccaattcgaccgcagcggcggacagggaaagattgttgctgagcatccactttctgaaatcctgcgtgagcataacctcgccggactgctccagtgccaggcggtgcaaggtcacggcagacagctcaaggtcattgccccatgtcacatcaaagccccattcacctacagctacttggctgaagagccccaggtccataagcggcttgaggatggggaaagtttttatatgatcgatgagatcgacggtatgttgcttaccattgttccactcgatttctagagcatgcttgccggcaactggttgcacagcagaaatgcgaagcttgctggtcataagtcagttcctccggttttgttcatcccatacccgatgaagatcagcgatatgagcttttgcccaattcagggcggctttcaaggcctttgtttcggcacctgcgccaagcacgacaagcccttctatctgaaccaaacactcgccatccggggtctgcacgtgaaagtgcggtggcgcgtggtcgtcgggatagatttttattttccagtttcgttcactgtgaagagtagccatgaggtcagatgctagagaaatattttccctggcacaactcgattttcttacctcgatagtcccgagaccttagctttctggaaacctatagcaatcggttgctggcaccttgagcaacatcacaagtttgcgaaatgtcctacgcgctttccggaagcgccactctcccacctcatcatctccatgcctatagtcaccgggtcgctcgaagagcgattgggtttggcgacccgactacaagacggcagaagcctcccggcagatttgcgggatgcccctgtacgcaataagctgctccatggtggctgtgcgtgggagaccttcgggtctgccggtctttgtccgttcttgtcccggttcgccaacctgcgtacagctgccaccttttgtttggcgacaaatgcgtggctccccccctaagtgaacggacttaacgcatgaaccaatacatggccctcaccagcaacgacagcaccacacccgccctttttgtcgacacaaccgtcccgcttgaaatcctcctcgacgctgcgaactatcgacttcgtgctgtgacgcaggtgcttgaaaaccttgcgctgcgtagtgagataagcagcgatgcggtggtactcagcgactttgctttactgtgctctatcccgttgcgggatgggtgtgacttgctggatatcatagagcggcgaatggatgtatcgcagccttagaagatattgcatgccgctttaggactatagctgccagtttcccttggttcggtataccaatccaaggggtgctggtttccgagggccgtgaaaaggcccccacacttggcacagatgtgggggccattgaacataagcggcgttattggtaatcctacaggtctaaacctttatggatttcatctagggtcacatccagctcttggttcaactggtcatgtacggtttggctgactaacccatgagtcagcagcgcagccagatagcccagcgtgtacatcgcaaagccgtgccgcttcgccggttcgttcttgaccctttcgatgttttctttcaagaggatgaatttactacgcgcttcggcaatggtgcgcgggctgtctttttcggttgggagcatcggcatagcggggattcctttctgttcgtaaagccttattgaaaggcttgccacaattgatagcagaaaatccacattaacagagagcctgcagccaaaccgcttagcactgaagggaccaaaaaaaaccaccataccctctgtgaccgaacttgaaattactgacttgatgcgatgaaccgctggataagttctggcccactcatgttttgtatcatcgcgctcgttcgagacatatggatgttgctccatatcatcttgatgacctcccaagctataaataacaccagagaaagcacagcaagaagcccacagagggcatacaaccgaggcggtagcttcggggaaagtgtggaccaaagcccaaaaaaccctgcatagcctgctactaagatgaggttgatataggttcctgcactagccatctgcctttcgtgcatctgtatcagtgcgttagcgcccttatctccttccagatgaagctgaaattctttgagttcatcaatagcttccgagtgcgtattcaccacggtttccacctgctcgttccattgctgctgattcatctcgttccgctcctttggagagttattacagatgggctcgtggacgcaaatatcgaccggcgtcgagcccaatatgcgccagatgatttggcgtgaaaaccaccctaagctcccgggttccgcacgctccgtttttcgcaccaatatagagcaccagtcccatggtggtcccatgaggctattttttggacgccaaaaaccacaaacccccgactttctctaggaaaatcaggggtttgcgttttcgtaatttggcggtgaaggagagattcgaactctcgatacaatttcttgtatacacactttccaggcgtgctccttaagccactcggacacttcaccgtatctcgtcaaaccagttcagtctgtcgaggcgcgctaatgtagtcgaaagcctttctgatggcaaaggtttttttcagaatattcatgcggttagccggttatgccgctcaccgcccggcaacgggcggtgattgtgccattctcaggcatcggcggtagacgtctggggcggcgattgcgccctgcgccaggcattccgatgcgctgtgcagggcaaaagcctgaccggccagtcagtcacagcgctttaccggggcgggcgtggtgggtaacgtctgctgcattcttctataacaagtcctacaaggaaccgcgtcatgagtgagttgattgcctaccacctcgaagacggtatcgcgaccctgaccttgagcaacggcaaggtaaatgccatttctccggcggtggtcagtgcctttaatgaagcgctggaccaggcggagaaggaccgggcggtggtggtgatcaccggcacgccggggattttgtcggggggttatgatttgaaggtgatgaccgccggccccaaagaggccatcggtctggtgacgtccggttcaacgttggcgcgtcgcctgttgtcgcacccgttcccagtgattgtggcgtgcccaggacacgcggtggccaagggcgcctttttgctgttgtcggcggactatcggnggcgnattacagatgggctcgtggacgcaaatatcgaccggcgtcgagcccaatatgcgccagatgatttggcgtgaaaaccaccctaagctcccgggttccgcacgctccgtttttcgcaccaatatagagcaccagtcccatggtggtcccatgaggctattttttggacgccaaaaaccacaaacccccgactttctctaggaaaatcaggggtttgcgttttcgtaatttggcggtgaaggagagattcgaactctcgatacaatttcttgtatacacactttccaggcgtgctccttaagccactcggacacttcaccgtatctcgtcaaaccagttcagtctgtcgaggcgcgctaatgtagtcgaaagcctttctgatggcaaaggtttttttcagaatattcatgcggttagccggttatgccgctcaccgcccggcaacgggcggtgattgtgccattctcaggcatcggcggtagacgtctggggcggcgattgcgccctgcgccaggcattccgatgcgctgtgcagggcaaaagcctgaccggccagtcagtcacagcgctttaccggggcgggcgtggtgggtaacgtctgctgcattcttctataacaagtcctacaaggaaccgcgtcatgagtgagttgattgcctaccacctcgaagacggtatcgcgaccctgaccttgagcaacggcaaggtaaatgccatttctccggcggtggtcagtgcctttaatgaagcgctggaccaggcggagaaggaccgggcggtggtggtgatcaccggcacgccggggattttgtcggggggttatgatttgaaggtgatgaccgccggccccaaagaggccatcggtctggtgacgtccggttcaacgttggcgcgtcgcctgttgtcgcacccgttcccagtgattgtggcgtgcccaggacacgcggtggccaagggcgcctttttgctgttgtcggcggactatcggattggggtggatggcccgttcagcattggcctgaacgaggtggcgattggcatgaccatgcaccacgccggtatcgagttggcgcgggatcgcctgcgcaagtcggcgtttcatcgttcggtgatcaatgccgagatgtttgacccgcagggcgcgttgcaagccggcttcctcgacaaagtggtggcaccggaagagctgcacgcggcggcgctggaagcggcgcgtcagttgaagaagctcaacatgaacgcccacaagcacaccaagttgaaagtccgtaaagaactgttggaagccttggacgacgccatcatccaggaccaggggcatatcctgagttaagccctacgcgtgatgtaccaaagcccgaccttgagtcgggctttttcttacaaccaattccgaatcatcttcagccgctctagcttgcccgtatcgacagatgttgaaacatgcgcttaaacatcgcctatctcctacctctaccggggtaattgccgaatacagtgcacaaccgtacactgcgccaccttttgtgccggtgggccgtgtcgatgcttttcctgttgcgtatgttgttgatgggcctgcactttatgcttgccggcgtgctcggcgtgctggttggtgtgtgccggccgttcaacccggacaacagtcgcctgtgcgcacgcctgtacgcgctgccggccatgtggatcctgcggctcaacgtgaaggccgatgtggactcgctgcgcaacaagcccggcacctgcgtgatcatcgccaaccaccagtccaactatgacctgtttgtgttcggcaccgtagtgccctaccgcacggtgtgcatcgccaagaaaagcctgaagtgggtgccgctgttcggccagttgttctggctggcgggcaatgtgttgattgaccggggcaatgcccacaaggcacgccgggcgatgcttaccaccacccacacgttgcagcacgaagacacttcgatctgggtgtttccggagggcacgcgcaacctgggccaagggttgctgccgttcaagaagggcgcgttccatatggcgattgcggcgggtgtgccgattgtgcaggtgtgtgtcagtaactacgtgacacatatgcagctcaatcgctggaacagcgggggtgtgctcatacggtcgttgccgccgattcctaccgttggcctgacttcggatgacatcccggcgttgatgcaggcgtgtcatgcgcagatggaagcctgtattgacgagatggaccgcgagttgcgggctgcctgaacactgcttgggggcgcttcgccccccagcgcgagcaagctcgctcaccacaaaatgctcgatgcaacgacggaacgccattcaggctaagctgcccaacacctgtcatcccaataagaagcgatcagcaccatgggtagagttgttgcggccgccgtctacagcgccggtaagaaagtttcggatatcaccctcgatgaaggcgcggcctgggccgccaaacccgaccactttgtgtggatcggcctggaagaacccaacgcccaggagctggccaacctgcaacgccagttcaacctgcatgaactggccatcgaagacgccctggaaaaacacagccgccccaagctggaaaccttcggcgatgcgctgtttatcgtcacctactcaccggtgcgcgagaacggcaagctggagtttatcgaaacccatatttttgccggcaacggctacatcatcaccgcccgcaatgggcactcggcgtcctacggctttgtgcgccagcgttgtgaggcgcggccgctgttgctggagcatggggaagatttcgtactgtatgcgctgctggatttcgtcaccgagaactaccagccggtgagcgaagcgatccacgccgagatcgatgaactggagcgcaacgtgttgtgcagttcgttgagcgagcgcgatatccagaacctccacggtttgcgccgcgatgtgctgcggctcaagcgttacgtggcaccgatggtggagatcagccaggagctgcagaagctcagcttcccgttcatcgacaagaacatgcgcccgtactttcgtgacgtgcagattcacgtgacgcggcagatggaagacctcaccaccctgcgcgatatcgccagccagaccatcgaaatcggtgtgttactggaggcttcgcgccagagcgtggtgcagcgcaagttcgccgcatgggcggcgatcctcgcattccccaccgcggtggcggggatttacgggatgaacttccagaacatgcccgagctgcaatggcactacggctattttgcggtactcgggctcattgccacgggttgcacggggttgtgggccagtttcaaacggtcgggttggctttaaacctgagcttcggacttgtgcgccacaaaccgcatcatccattccgccacggttgcaccgtggtggtcgcgctcaaggctggctacgccgtttgtgtagaccttttcgcccagggttgtctgaagaatctccagcaactcgcgggaataatcatggacaaattccgggtgtccctggaagcacagcacctggtcaccgatgtgatacgccgcgaacgggcaaaacgcgctggaggcgatgacggtggcattctccggcaacgtggtcacctggtcctgatggctgatcaatagggtcaattccggtacttcagggctcatccacggggccttggcatcgagctggtagtcgtggatgcccatgccccagccttggccggcgcgctcggtcttgccgcccagcaacagtgccagcaattgatgaccgaagcagatgccgagcagcttgtcgccacgctcgtaacggtcgagcaggtaggtcttgagagtctggatccatgggtcagtgccgaaggagtcggccttgctgccggtgaccaggtacgcgtcgaacacttcgtcgtccgaggggtattcaccgttcaccacgttgtacaccacgaactcggcgggaatcggctgcttggcgaacaggcgcttgaacatctgcccgtacccttggtattgatcgatcaagcctggacgcaggatatcggtttccaggatacagacgcgtagcgacataaaaaatacctgacacggtgatgggaatattgcacaccccagagcctgccttgaaataccccttcaaggcaagccccccagcttcaccggaacacttcaccctgcgccgctttctccagcaacaaccccggcagcatgaaacgttcgccatactgttcagccaggtagcgagcgcgggcgataaagtccttcagcccatattggttgatgaactgcaacgcaccaccggtccaggccgcgaaaccaatgccaaaaacagaccccacgttcgcgtccgccgtggacatcaacaccccctcttccaaacagcgcaccgtctcgatcgcctggataaacagcaggcggtcgcgtacatcctgcggcgagatgcgctgatcaggtcgctcaaagcggcttttcaactccggccacaggtacttttgcccgccgctggggtactcatagaaaccgcctcccgccgccttgcccgcgcgcttgtattcgttgaccaacagatcgatcaccgctgtcgccgggtgcgtaggcagcgccttgccttccgcctgcagatccttggccgtctgctgtcggatatggctcatcaggctgagggacacttcgtcagacaccgccagcggccccaccggcatgccggccttgcgggcttcggtctcgatcatcggcgcggccacgccttcgccgagcatggcgatgccttcgttggtgaaggtgccgaacacgcgtgatgtgaagaagccacgactgtcgttgaccacgatcggggttttcttgatttgcaggacaaaatcgaaaccacgggccagggtctcgtcactggtgcgcgcgcccttgatgatttccaccagcggcatcttgtccaccgggctgaaaaagtgcaggccgatgaacttggcttgatccggcactgccgtggccaggccgctgatgggcaaggtggaggtattggaggcgatcacagcgtcggcgccgaccaccctttgcgcagcggccgagaccttggccttgagttcgcggtcttcgaacaccgcctcgatgatcaggtcgcagcctgccagatcagcatcggatgccgtaggacgaatccgcgccaagacggtttcctgctgctcggcggtcaattgcccacggctgaccttcttgtccagcagcaccgccgaatgcgccttgcccttctcggcggccgccaggttgatgtccttgagcaccacctcgataccggcgctggcgctgacataggcaatgcccgcccccatcatcccggcgcccagcacaccgactttgcgcgtgacatacggtgtaaacccttgcggccgcgaactgccggcgttgatctcgttgagctggaaccagaaggtgccgatcatgttttttgcgacctgccccgtcaccagctcggtgaagtaacgggtttcgatcaggtgcgcggtgtcgaagtccacctgggcgccttcgacggccgcacagagaattttctccggcgcggggaaacagccgttagttttactgcgcaaaatcgacggcgcaatggccagcatctgcgccacttttgggttcgatggtgtaccgcccggaatctggtaggccttgttgtcccacggttgcctggcgtccggattggccaggatccaggctcgggatttggccagcaactcatcgcgatccgccgccagctcgttgatcaagccggcttgcagcgcctgttgcggccgcactttcttgccttcgagcaaatacggcaaggccttttccagcccgagcatgcgcaccatgcgcaccaccccgccgccgcccggcagcaggcccagggtgacttccggcaagcccaactgcaccgacttgtcgtccagcgcaacgcggtaatggcacgccaggcaaatctcccagccgccccccagcgccgcgccattgatcgcggccaccacgggcttgccgagggtttccagacgccgcagttgcgctttcaacacccgtacaccgtcgtagaaatccttggcgtgggccttgtcgaccttgatcagttcattgaggtcgccacccgcgaaaaacgtcttcttcgccgaggtaatgacgacgccggcgatgctatccctttccgcctccaggcgctccaccgtagccgccatggcctcgcggtacactgcgttcatggtgttggcgctctggccgggcatgtcgagggtcagcaccacgatgccgtcctggcctttttcgtaacgaatggcttgggtcatgacaagttccttgggctcagaggcgttcgataatggtggcgatgcccatgccaccgccgacacacagggtggccaggccatagcgctgctggcgtacttcgagttcgtcgagcagggtgccgaggatcgcgcagccggtcgcgcccaacgggtgccccatggcaatcgagccgccgttgacgttcacgcgtgcggcgtcgatgcccatgtccttgatgaacttgagcaccaccgaggcaaacgcttcgttgacctcgaacaggtcgatgtcttcaacgcgcagtccggccttggccagggccttgcgcgtggcgggcgcggggccggtgagcatgatggtcgggtcggtgctggtgaccgctgtggcgacgatacgcgcccggggttgcaggcccagctcgcgccccttggcctcggagccgatcaacatcagcgcggcgccatcgacgatgccggaactgttgccgggggtgtgtacgtgatggatgcgctctacgtggctgtagacacgcaacgcggtggcatcgaagcccatctgcccgatcatttcgaaactcggcttgagcttgccgaggccttcaagggtggagtcgccgcgaatgaattcgtcatggtccagcagcacgatgccattctggtcctgcaccgcgatcagcgacttgttgaaggaaccgtctgcacgcgccctcgccgcgttctgctgggaatgcagggcaaaggcgtcgacgtcctcgcgggtgaaaccttccagggtggcgatcaggtccgcgccaataccctgtggggtgaagtgactgtgcatattggtctgcggatcgagcacccaggcgccaccgtcactgcccatgggcacgcgggacatggactcgacgccgccgaccaccaccagatcctcgaagccggagcggactttcatcgcccccaggttgaccgcttccaggcccgacgcgcagaagcggttgacctggaccccggcgacgctgatgtcccagtccgccaccagcgcggcggtcttggcgatgtcggcgccctggtcgcctaccggggtcacgcagccgagcacgatgtcgtccacctggtgggtgtccaagtcactgcgcagggccagcgccgtgagcaggccggctaccaggttcaccggcttgacgctgtgcagggcaccgtccgccttgcctttgccacggggggtgcgtatcgcatcaaagatcaacgcttgggtcatgacgtcctcgaaccagtgtgcatgtgtgcctctaccttaggcccgattgacacggtttcaatgacggatgcgctcattgcttttgaccccctcgctcggacgaacggtaggcacctaaggtaatcacctgattaatcgttttagctgtctagccaaggcattggcgccaagatggcgatatgcctcatgcctttttaagctgaaattctgattagctgatatgaaatgagtctaagccgcgaagaacgagggctctaaggttgaatcagtaagaagttgctgccgggttttgctggagcaactgtaagaaaagcgacacgtcatctcgccatactgaaataagaccggcacgcatttgacgctcaggaataacaacaaaaggcagtcagccatgttcaaacattcgaaagtacgtcaggcgggactcattctgttcgccaccacactgattctgatcttgcccaatttgaccaaggtcattgggtgaccccccaacgccacattccgtgcattcacagcaccgggtctgcagcttttggcagcgcctgccaggacattgcgcatagcggtccggcaggggctgtctttttgcgcgccgatttccggtatcgttagcttaaacagccctttgattcgagcctgcgtcttgaaagccatccttgccctcctcgccctgctgatcgcgcttcctgctgcggccgcgcaattgaccatcgaactcaaccactcccgcaagacctggcagaccgccgacttgctcaagcacccgcaagcgcagacggtgcagatcgacgatgacgtctcctacaagcgcagcatgagttatcgcgcagtgccgctggccgtgctcctaccgggtttgaaacccgagagccatctgcaagcggttgccctggatggattcgccgccgaactcaccgccgcgccgttgctggaacaacagggtgcacgtgcttggctggcggtggaggatcctgctcaaccctggccggcactggcgcagggcaaacccagtgccgggccattctacctggtgtggaccgacccgcaagccggggctatcagccctgagcagtggccgttccagatctccgggatcaagcagttgaacacggtagcggagcgctttccggcgttgttgccggatccgaagctggcggccaacgacccgatcaaccagggttttgccctgttccagaaaaactgcctggcctgccaccgcatcaatggcgccggagacgcccaggtgggaccggacctgaatatcccctacaaccccaccgagtattttggcggtgatttcctcaagcgctatatccgcgacccacagagtttgcggaattggccgcaggcgaagatgccggcgttcgcggccagcgtgttgccagacggtgagctggatctgttggtggggtatttgaagcatatggccgggcgtaaacagcaaccttaaacatccggtggtgaacgcgttgtggtgagcgggcttgccccgcgttgggctgcgcagcagccccaaaaccaggaaccgaagaaactcctgacacaccgcattctgcttgatcagggctgctgcgcagcccaacgcggggcaagcccgctcaccacaacaaatctgctcaccacaacaagtccgccagccacaacaccccgctcgccgcaaccgaatcattgctgctggacggaaatcaccggcgtcggcgccacgaacaccttcgcatgcatctgctcgtgccccccgccccggcgcatgccgcgcaccgggcaagcgtctaggtaatccagccccaccgccagcttcaagtgccgctccgggcgggccaactggttggtcacgtcaaagctgtaccaggcgtcatccagccaggcttcggcccaggcgtggctggccaggtgcgtgctgtcctcggtgtacaaataccccgacacataccgcgcaggaatgcccaggctacgcgcacaggccaggaacgcgtgggtgtggtcctggcacacgcccgcacggccggcgaaggcctgggcggcgcaggtgtcgacctcggtcgcgccgggcgtgtagaccatcgcctggttaagtgcctgcatcaggtcgatcaatgccgtacggtcgcgccgttgatggcagtgctgttcggcaaaaccacgcagggcttcatcgggttcggtcaggcgcgtgcagcgcaggaacgggaacgccgattggctctcatgctcggcctcgcgcaactcgtcgatgtccacctggccacgcgcgccaatgatgatggcgtcgtggggctcgtccagggtcaacacatgcaggatgttgccgaacgggtccacctgggcacgcaccgggcgtggcaggtcaagttgccaactgagtacatgctggcgctcgctgtcatggggcgtgaggcgcaagtattggatgctggcgcgcacctggtcttcatagtggtaggtggtttcgtggctgatggagagtctcatgccgcctccaggtaggaactgtagatggcgtcgcccaactggcggaccaaaggaataaagtcggtcagccaggcgtgcaggccttcctcaaggatttcatcgatggcggtaaagcgcaggcgcgcatccatctcggcggccaggcgctgggccgggcggccgttgatgccaggcaggctggcgagtatctggtcgatctcttcactgcaggcccgcagtgagcgtggcacatcggcgcgcaacagcagcaactcggcgacttgccgtgcgccgggcgcatcgcgatagatctcggtgtaggcctcgaacgacgacaaggcacgcagcaaggcgctccattgatagtaggcgtgggccgtgccatcggtgacagcctcggcgcggtcaccggccatctcatagcgggcgtccagcaggcgcagcgtgttgtcggcccgttcgataaaagtgcccaggcggataaatcggaaagcatcgttgcgcatgatggtgccgtaagtggcaccccggaacagatgggagcgctccttgacccactcacagaaccggctcatgccataacggctgaggccctgctgggcgatatcgcgaatatccagccaggtggcgttgatgttttcccacatatccgcggtaattcgcccacgcaccgcatgggcgctggcccgcgcggcgccgagacaactgtagatgctggccgggttggccgcgtccagcgcaaaaaagtgcaacaggcgttcggcgtgcagttcgccgtgacgttcgtggtaatcgtccagggtgccggtaatcaatagcggcatggccagttcatgcaggccgtcgccgcgcccatcctggggcatcagtgacagcgaatagctgacgtcgagcatgcgtgcgaggttttccgcacgctccaggtagcgcgacatccagtacagatccgaggcagttctactcaacatggcatcagtcctcgaccacccaagtgtctttggtgccgccgccctgggacgagttcaccaccagcgaaccttcgcgcaaggccacgcgggtcaggccgccgggcactacacgggtctccttgccggacaacacaaacgggcgcaggtcgatatggcgcggcgcaatgccgttttcgacaaaggtcgggcaggtggataaacacagggtcggttgggcgatataggcgtggggcttagccttgatccgtgctcggaaggcttcgatttccgctgccgtggacgccgggcctaccaacatgccgtagccaccggagccttgggtttccttcaccaccaggtcgggcaggttggcgagtacgtgggatagctcgtccggtttacgacactggaaggtcggaacattcttcaggatcggttcttcatccaggtaaaaacggatcatctcggtgacgaaggggtacaccgacttgtcatccgccacgccggtgccgatggcattggccagcaccacattgccgcagcgataagccgcgagcaggccggacacgccgagcatggagtccgggttgaaggccaggggatcgagaaacgcatcgtcgagacgacggtagatcacgtccacggccttgggcccatcggtggtgcgcatgaaaacgcggtcatcgcgtacgaacaggtcggcgccttccaccagttccacgcccatctcgcgggcgagaaaggcatgctcgaagaacgcgctgttaaagcggcccggcgtcaataccaccacgctggggttatccagggggcttgagcttttcagcgtgtcgagcagcaggttgggatagtgatcgatgggcgcgatgcgctgggcagcgaacagttcggggaacaggcgcatcatcatcttgcggtcttcgagcatatagctgacgccgctgggtgtacgcaggttgtcttcgagcacgtagtacgtgccgtcgccatcgcgtacgaggtcgacgccggagatgtgggaatacaggtcgcggtgcaggtccaggccctgcatcgccagttggtattgctcgttggccagcacctgttcggcaggaatgatcccagccttgatgatgcgttgctcgtgatacaggtcggcgagaaacatgttcagcgccttgacccgctggatacagccacgctcgacaacccgccattcgctggcgggaatactgcgcgggatggtatcgaagggaatcaggcgctcggtgccctgctcgtccccgtagagggtgaaggtgatcccggcgcggtgaaacagcaaatcggcttcacgccggcgttgagccagcaattcaggcggggtttcggccagccagcgggcgaactcgcggtaatgcggtcggaccaggcctgccccatcgtacatttcatcgtaataagtgcggatcatgccgaactccttgtcacccgggcgaaagaaccatcgcaaggcccgtgccagcggcataaacacttaaaaatcagtgagttgaattaaccacgcaatctgctcgcaccgtcctggtgcgcagaatgcccagtgcactgccccacgcttcatcgcaatgcgggctttgactatcaacagcatagtcagagttgatttcactgcccggcgcaggctgcggataatcggccccatctgctgaactgccttcagcgctccgctcttccctttaggccacccgtatgggtggcctttttttggtgcgtaaaaatagcgcgcaagttccgagttattttcccaccgcacaaacaaaatcggccgacccaaaggccagccgatacgctgtgttgctcataaactgccgctacatgggtaacccacgcacctcctgcttcacgccccatccttcgatgatcccgcccagcggctcgaccaccgccccgaagtcttgctcgaaatctcctatgccgtcgtaggtcgcaaacatgactttgctcagttccaggtaccaggcgccatcgtcgcgcgcactcacctgggcattcagggattccccgcgaaactcacccgcagccctgcgcgcccgttcctcatccgggaaaatggcgtagaactcgatggggtgaaaacgcgagaagtcgaagccgccttctttcatgcggcgcagaacattggtgctgatgtcttcttgataggctgtgctcatgaaaagtgctcctcaaattgatggatagactttccgtgcttcccgaagcccacgccgcaatggcgtggggactacggcaacaacatcaccgctggaaaacaagcatgtagctgacaagaccagaactagcgattcattcgctgatctcgtttgcagagtagcgcgaagctatcacctccaccagaggcgcttggatggactacagggaatgttcaggcggcgggagagatgtcgaggatctggatgctgttctggtctttgaggatcttgaccgtcggctcgggcttgcggccctccagatcattgaggtccagttcggcggcgacgggcaccagcttgttgcgaatcatgtgcgcagcgtcttcgaggctgggcttgtgttcgcaggtgaactgctccacggtctgcacgccgtgatcatcaacgaaggtaatttgccacgtttgcatcggtgcctcctcgataaaacccatgtgtgggcttacacatatctggaccttgagcgctggacaaacgttccactcaaggccggaggcaccggatcagctgcagttatttttccgcgtgttgcttcaaggctttcaaggtgttgaacggagcgtccaccacgaacttgttggccagccacgagggcacgctgccgcctggctcggtatgcacctggtaggtgacttcggtcaggttgtcgcctttggggaccagtttccagaagccttcaacctgggctacgcgtacgaagcctttttcttccggctgataagtaggaacctccagcaaggtccgagtgacactgccatcggcacccttggcagtggtgattttcaggatcgaatcacgattactgacggggaacggcgcattgaactgggtgtaggtatagctgacgtcaccctcatgtttcagcagcttctgcaatttgcactcatgaatccacttgcacgcaccgactacgtcttcctgcaacgcgacgatcttcgccaccggtgccttgatcgtggtcaccccgcgatacgccttgtacttggagccggcaatttcgctcagggacaccttgataccgtcttcgtccttggcgacttgccaatcctcagcctgggcagtggcagcaaacaacaccgtaaaaccgcacaacacagccattcgtttcagcgaacccattgttgtattccttattgttgaagttccgatagtaaagcccatcaagccgccgtcatctgctcccaccagccgatcaagcggatcgcatcggcctggtcggtgccgcagacctcgagatccgccttgaaatcactgcacaccgccggtcgctccggctggccgaacagcaggcatagctgttcgaccgataggtgcaggcagcgttcgcccgccggtttgccctgtggcatgcccggtaatggcgaactgatggagggggcgatgcagcaagcgccacagccttcacggcaattcatgaccagcaggtcctcgacgactcaatgtggatggccggactagagtacgccctaaaacagccgttttaaaatgggttaacaggggtttttcgcagaaaacaaaagtgactgaccagtctgcgacagatggtcgagggcacgcgtcacgtttgtgggaaaagtttactgcttgaactcgaactccaccgcggcgccttcgacttcgcgccgttcttcgttgcgcaattgcagcttcatttcattgctgagcaggcggccgttgatctggaaggcgctgttgtcggtgggtttctcaccgaacatcggcggcagcaagggcacacttttgggtttgggcatggtaccgataggctgcaagtgcctgaccatgtccgacggcagggacaggtccaactgtgccggtggcaattgtgtctgcgtcacttcgcgggatgccttggacttgctggctgcacgttttttggcggcagcggtgggtttcttcaccgctggggcttttttaacgggagccgtttttttcgcggagggcttctgctcgttactggcggccggcttggtttcactcacaggcgctgccgccagcactgtgccgacgttgcacaggcttaacaggccaattaccagaacagcgcgaaaaatacaggtcatatcgcctacagcattaacggcagagggccatatgctcgcttgttgtgcgcggcatgacaagcacagtgattagtgtgctagaggatttgtcccctttctgagcgtcataatcctgctgctgtttcctggcataactggctcgccagcatccccaacgtcatcagcgcccgctctgcctcgcggttccacggggtgccgcagttcaggcgaatacagtggttgaactgctccgtattactgaagatcagccccggcgcaatactgatgccctgttgcagtgcgcgcacgtgcagttcctgggtattgacccttccaggcaaactgacccacaggatgaagccgcccgtcggacgggtcatctgggtgccttccgggaaatactgctgcaccgccagttgaaaggcgctgaggttcttgcggtattcctggcgaatgtagcgcaggtgccggtcgtagccgccattctccaggtaagcggcaacgcccatctgcgtgacactgcacgcggagtgggtgctgaacatctgcaggcgctggatctcctgctggtatttgccggcgatcatccagccaatgcgcacaccgggggacagcgtcttggaaaagctggagcaatagatgacccgatccaggcggtcataggctttcagcgccttggtgcggcccagttcgaacatcagctcgccgtagatatcgtcctcgacaatctggatgtcgaagtccgaggccaggcgcagtaactgtttctgccgttcctcaggcatggtgccgcccagcgggttgctcaggcgcgtggtcagcaccagggccttgatcgaccattggttggccgccagttgcagggcttccaggctcatgccggtggacgggtcgctgggaatctcgatgaccttgaggcccaacagatcggcgagttgcagcaagccgtaataggttggcgactcagcggcaatcaggtcgccaggccgcgtcagcacccgcaacgacatctgcaacgcatcgacacaaccgtgggtgatcaccacttcggacgggtccaccaccacacccgcatcgcgcatgcggatcgccacctggcggcgcaacggttcgaaaccggggctgaacatgtagctgaacgcacgcgggctctggaagcgcgtgaccttggccaattgctggtgcagggcgcgtactggcaggtagtccacgctcggcactgcagcgcccaacgggaacacaccttcgcggcgcgattcgcccaagacctgttgaatgatactgctgcgggtgaccaaccctgggcgctcgacccgtgcaatgtccggcgtcggcgccgtgagtgctggcgtctggtgcacataatagccggactgtggccgcgcccggatcagcccctggtcttccaggttggcgtaggcctgcaacaccgtggcgtggctgacgttcagctgtgagctcatcttgcgcaccgaaggcacgcgctcgcccggttgatagacaccgcgccggatatcctcagccagttgctgggcgatacgttggtaaagcaacagattggtcatgacgcagcactcgatttcacgggtattttatttttgtgtgaaacataccggcacagtttagaagtgtacggggacagttgccacaatagtcgagcgcgcgtttgagtgacagtaaaactgtgagggtgcacaccaaaaaatgtgggagggggcttgcccccgatgacggtgggtcagcgacagatttgctgactgatgcaccgctatcgggggcaagccccctcccacattcagagcggctccaggcttctatcgggcagcgcccagttggcctttctcgtcagagaagacgatttcaacgcgacggttctgcgccctgccccgctcggaggcattggcctccaccgggtactggtcgccatacccttccacctggatgcgtttttcgtcgatccccaggtcgaccagcacatcagccaccgactgcgcgcggtcgcgggacagtttgaggttttcctgctcgccgccggtgttatcggcgtagccctcgatacgcaccacacgcttggggttcagttgcaagaactgcacgatcttgagcactgtgcggttggccgagttcttcagctcggcgtcaccggtgtcgaacagcacatcgcccagggtcatcaccaggccacgatcggtctgggtggtggtcaggctggcgatctgctcttcaagccatttaccctgctgctgcacgctgctcagcttgctttcacgcagcgccagctgcaggcgctggcgctccagttcgagcttggcgccgcgctcctggttgagcgcctgttcggtgtgttcgcgggcaatcgcgctatagcgctggctcaagtaggcgtaatgcaccacgtcggcaccgctgccccagtagctggacaggcgatcggcacgggccagggactcaccggcgcggatcacgtccttgggcgcaaagcgcaacacattggcgtcttccttgaccttctggaagtcattcccggcctgttgcagggcctgttcgctgtcgggatggctggcacaaccgcccaatacagcagtgcccaacagcagcgcacagcccaaaccacggatcatcggactcattgggcttcccccaactgcaattgcttgcgcaggcgagtgatgcgggtgttgagcacgttcaactgctcctggctcttgcgggtcaacactttggcttccgccagacgcgcgtccaactcggcttgctcaaagcgcatgcgtgcatttttgtaggactggtcagccatgctcgacttggcccgggcgaatttctcttcggccagtttcagttcgggcgattcatcggggttggcgccaacagcgctggcttgctccagggcttgctgggtgaggcgaatttgttcattcggcgcaggatcagctgcacatcccgccagagcgacaacggcgagggccgcgaaaagaggtcgaagagtcactgaaaatccctactttgttggggtgccgacgggttgttgcaattgcgctttccaacgttccagattgcgctgcaatgcggcttccgtcacaccagacccgggcaattctgtcatctttttggcgagctgtccgcgcaaccacggatcgttgcaggccgagttgtgggaaatcgccaggtacaggcccggctgatcgacgggcacgtcgcgggtgatcaggtcgttgctcatgcccaaggtctgtgccattgccatgccggaataacgcccggcgaggacatagtcgacctctcccagcagcagcttctgaaacgccggcgtcagggacggcaggcgttgcaggctcaattgctggccggcgaacgtttcgaaggcggcactcaaacgcgcacgttccgacaccgcgcctttgtgcccgtgcaggtcggccgccgtggtgtaggccagcgctgaatccttgcgcgtccacactaggtagtcgagctgcaccagggccgggtggatgtagtcgagggtttccagctcgcccaggttcagcggcgcatcggcaaggatatccatgcgcccgctgcgcacctcatccagggccagcgaacgtttgccgccgtagagcaggtcgattttcaacccgaggtccttgcccacttgttgcagcacgtcggcggtggcgccgatgaggtgcgtggggtcttgcgggtcacgccagagcaggggcggcgcgtccggactgccggtgatcaccaggcggtcgcatttgccggcggccagcgtcaggctcggcagcagagtgaggcccagcagtacggcccagggacgcagttccatggcaagtgtctccagcaagtcaaaaaaaagcccggtcacatggaccgggctctttataagtgaagcgactggattagaccagcttctccaactcagggacagcttcgaacaagtccgccaccaggccgtaatcagccacctggaagatcggtgcttcttcgtccttgttgatcgcaacgatcaccttggagtctttcataccggccaagtgctggatcgcgccggagataccgacggcgatgtacagctgtggcgcaacgatcttgccggtctggccgacctgcatgtcgttgggtacgaaacctgcgtcgacggccgcgcgggaggcgccgaccgcagcgcccagcttgtcggccagggcatacaggtgcttgaagttgtcaccgttctgcatgccacggccgccggaaacgacgatcttggcagcggtcagctcaggacggtccgacttggccagctcttcgccaacaaagctggaagtgccagcgtcgtgggcagcggcgacggcttcaacggcagccgaaccaccttcagcggcaaccgggtcgaaaccggtggcgcgtacggtgatgactttgaccgaagcgttggactgtacggtagcgatagcgttgccggcatagatcgggcgcttgaaggtgtcggcgctttcgaccgagatgatctcggagatctggtcaacgtccagctgcgcggcaacgcgtggcaggatgtttttgccgttggaagtagcggcagccaggatgtggctgtagccagcgcccagttctgcaaccagaggggcaacgttttccggcaactggtgagcgtaagcggcgttgtcggccagtagtactttgctcacgcccgcgattttcgcagcggcttcagccacggcgccagcgccttggccagcaaccaatacgtggatatcaccaccgattttcgcagcggcagccacggtgttcagggtggccggggccagcaccttgttgtcgtgttcagcgattaccaagatagtcatgattagattaccttcgcttcgtttttcagtttctctaccagttcagctaccgacttgaccttgatgcccgcgctgcgtgcagccggtgcttcaactttcacggtcttgttggtagaggcggtggaaacgcccaaagcttccggagtcaacgactcaagcggcttcttcttggctttcatgatgtttggcagggacgcgtagcgcggctcgttcaaacgcaggtcggtggtgacgatggccggcagtttcaaagaaacggtctgcgcgccgccgtcgatttcacgggtgacagcaacgctgtcgccgctcacttcgaccttggaggcgaaggtgccctggccgtaaccggtcagcgcagccagcatctggccagtctggttgttgtcgctgtcgatggcctgtttgccgaggatcaccagctggggctgttccttgtcgacaacggctttgagcagcttggcaacggccagggaggtcagctcttcagcggactcgaccaggatggcgcggtcggcgcccagtgccagggcggtacgcagctgctcttgagcagtggtcgggccgatggaaaccacgacgatttcagtcgccacgcctttctctttcaggcgtacggcttcttccacggcgatttcgcagaaagggttcatcgacatcttgacgttagcgaggtcgacgccggaattgtccgccttgacgcgaactttcacgttgtaatcgacaacgcgtttgacagctacaagaaccttcatggattcctcgttactctccggtgaaaagaaagtcgcctaggcgaacctggcggttgatgctcatcggcacacaagggcacctccaaaaacgcaggcggcgaccttgctcacgggaaatgatgaccgttcgtcaggggtgactgagaggtcattctttatcgcagcgtgtaaactgcgcgccagtgtttgggcacgcgtcacctgtcttgcttttggacgtgctcttgaaacctgctgtctgcctacggtaagcgcaaaaccgaccgtatattgaccggaacgcctattctggtcaatacggcaaaatagccagtcataagccgcaccactttgatttatctagcctgcgagcaattcaaacaaacgtttgtattggacgctgccagtggtgtagatataatgcgccacctagagagaaaggtgggtcttgccgttgccgtaagacgacaccgaacctccacccattagaaaaaaaagcctgttgagccttgagtaggagatagcctgtggaacgcgaatacatggaattcgacgtggtcatcgtcggcgctggcccggcgggactgtctgccgcctgccgactgaagcagaaggccgccgaagccggtaaggaaatcagcgtctgcgtggtcgagaaaggctccgaagtcggcgcgcatatcctctccggtgccgtgttcgaaccacgcgccctgaacgaactgttcccggactggaaagaactcggtgccccgctcaataccccagtggtgcgcgacgacatctatgtactgcgcagccccgaagcctccaccaaggtgcctgacttttttgtgcccaagaccatgcacaatgaaggcaactacatcatctccctgggcaacctgtgccgctggctggcccagcaggccgagaacctgggcgtggaagtctacccaggcttcgccgcccaggaagcgctgttcgacgaaaacggcgtggtgcgcgggatcatcaccggtgacctcggcgtcgaccgcgaaggcaatcccaaagaaggcgtctacaccccaggcatggaactgcgtggcaagtacacgctgttcgccgaaggttgccgtggccatatcggcaagcagctgatccagcgcttcaacctggacagcgacgccgacgcccagcactacggcatcggcctgaaggaaatctgggaaatcgacccggccaaacatcagcctggcctggtggtgcacaccgccggttggccgctggacatcatgagcaacgagaacactggtggctcgttcctctatcacctggaaaacaaccaggtcgttgtgggcctgatcgtcgacctgtcctacagcaacactttcctgtcgccgttcgatgagttccagcgcctcaagcaccacccggtgctggcccagtacctcgaaggcggcaagcgcatcagctacggcgcgcgtgccatctgcaaaggcggcctgaactcgctgccgaagatggtcttcaagggcggcgcgctgatcggttgcgacctcggcaccctgaacttcgccaagatcaagggcagccacaccgcgatgaagtccggcatgctcgccgccgacgccgtggccgaccgcctgttcgctgactccgaaggcggtgacgaactgaccgcttacgtcgacagcttcaagtccagctggctctacgaagaactgttcgccagccgtaacttcggcccggcgatgcacaagttcggcccgatcatcggtgccggcttcaactggttcgaccagaacatcctgggcggcaagatgccgttcaccctgcacgacaccaagccggactacgcctgcctcaagctggccaaggacagcaagaagatcgactacccgaaacccgacggcaagctgagcttcgacaagctgagctcggtattcatctccggcaccaaccatgaagaagaacagccgtgccacttgaagctgaaagacgcgagcatcccgatcggcaccaacctgccgctctacgatgaaccggcgcagcgctactgcccggccggcgtgtatgaagtgatcacccaggaagacggcgaaaagcgcttccagatcaacgcccagaactgcgtgcactgcaagacctgtgacatcaaggacccttcgcagaacatcacctgggttacgccggaaggcgcgggtgggccgacttacccgaatatgtaagctcgcgactcgaacaaaaaggctcccaaatgggagccttttttatgctgcgcgctcttcgccgggattgcgcaggaagtagcgcttgtactcgcgactgaactgcgacgtactctggtaccccacgctgtgcgccgcctgcgccacacccataccgtccaccagcagcaactgttgggccttgagcagacgcagacgcttgaggtactgcaccggcgacaacaacgtgcagcgcttgaagtgctcatgaaaggtcgacgcactcatgtgcgcatacccggccagcgtctcgatattcagcggctcggcatagtgggcatgcaggtgattcaatgacgtggcgatccgcgaaaactgcccctgctgttccaccagtgctcgcaacacatcggcctgcgggccccgcagagcggtgaacaacacttcccggacccgcgccgcgcccatgatccggctttccagcggatcgtgcaggcattgcaacagccgctcgacagcaccgcgcattgcgtcatcgagcatcaccgaactcatcgactccagcgtctgcgccgtgggtggcggcccggcctgaatgcccatggccatgaccaattcgcccaggaccacgcggtcaatgcccaccgtgacaccgtacaacggcgcatcagcgcccatggcaaaggtctcgcactcgaacggcaccggcatggcctggatcaggtaatgcccggcgccatactccaacgtgcgcggccccaggtaggcgactttgctgccttgggccacgaacatcaggcttggctcatagatctgcggcccgcgtgccacgtcacaactggcgcgcagcacttgcacaccgggcaggtgggtcggggaaaaaccgtcgcagggcgtaagcccctcaatcaaggcaaccaaggtggcattggcatcgagatggcgggtcaacaacatggcaaaaaacttcgcgaataagggatgagaacatcatcgcaggtctggcggccaatggatccaaaccaggggcactcccggacgaataggcatgagactcggagcaatcgccatggccgcatcaggacccggcgcggagaatgcgccgcctcacctgtcattgcttttgcgaggtttccccatgtacaccgccatcggttatgccgcccagtcggccaccactcccctcgcccccatgtctttccagcgccgcagcccgcgcgccgatgacgtggccatcgagatcctctactgcggcgtctgccactccgacatccaccaggcgcgcaacgaatggggcatcgccgtgtacccgctgatgccgggccacgagattgtcggcaaggtcaccgccgttggcgccaacgtcaccgcgcacaaaattggcgacctggtcggcgtgggctgcatggtcgattcgtgccgtcactgcgacgcctgcaagtcagaccttgagcaatactgcctcgaaggcccgaccatgacctacgccaccccggaccgtgtagacggcagcaacaccatgggcggttactccgacagcatcgtggtcagcgagcacttcgtggtgaagatcccggccaagctcgatctggccagcgcggcgccgatcctgtgcgccggcattaccacctactcgccgctcaagcactacggcgtgaaggccggcgataaagtcggcgtgctgggcatgggtggcctgggccatatgggcatcaagttcgccaaggccatgggcgcggaagtgacgctgttcacccgctcggcgagcaaggccgaggaaggtcgtcgccagggtgccgaccatgtaatcgtgtccaccgatgccgagcagatgaaagccgccgccggccgtttcgacttcctgctggacaccatcccggtgcagcacgacctgaacccctacctcgacgtgctgcgctttgacggcgtgcatatcctggtcggcctgatcgagccggtcgacccgcccgtcaacgccgccaagctggtgctgggccgcaaagtgctggccggttccttgatcggcggcattgccgaaacccaggaagtcctggatttctgcgccgagcacaacatcacctgcgacatcgaaatgctcgacatccgccatatcaacgaagcctacagccgcatgatcgccggcgatgtgaagtaccgttttgtcatcgacatgacgaccttgaaggcctgatcaggccttcgcgcccaactccgccgacagccgggctgcgacctgtttgaccacgggaatcagctcggccattttctccaagggcatgtagggcacggtactggcgatgctgatgccggcgacgatgcgccggctggcatcgcgcaccggggccgccacgcaacggatcgacggttcgttgtcttccaggtcgaacgcatacccgcccaccacgtattcacgcatgcgctgctcgaactgcgcccaggactgttccgggtgctgcggccactgcaggcttttcccgcccaccggcaggctgacgtcgtacagacgctgccactcttccaccgtgtcatccagcagcaatgccttgccaattccggtgcgcgccagcggcatgcggtggccgactcgcgagcgcatttccgggccattgcggccggggttcttgtgcaggtaaagcacgtcatcgtattcgcgaatggccaggtggatggtgtcaccggtcaatgccgacagctcatccagatacgggatagccaaggtcaccagcggcagctcttcccgcgcctgaaaccccagctcgatcaacttcggccccagcaggtaaccgacttgcggcactacgcgcaggtaacgctcgtccaccaggcaactggccaggcggtgggtggtgctgcgggtggtgccgatgcgcttggcgatctctttcagatcccgcgcacccgccgccacggcctgcaccacgcccaggccgcgcagcagggtctgggtgccggtgggggcggtgtctttgacgggggtgtgggcgttttcctgcatatcaggcctatgtggtggtacgaaaacgagcggcattatggcaaaagctgaacctcaatacagcgcagatccaaatgtgggagggggcttgcccccgatagcggtgtgtcagtgaatgcatgtttttctgacgtgccgccatcgggggcaagccccctcccacatttgaatcttcatagggctcgggatcagcgctgtttcatgcggtcaatgatgaccgccagcaacaggatcgagccacggatgacgtattggtagaaggtgtcgatgttcttcaggttcatcgcattctcgatgatcgccaaaatcaacaccccggcaatcacatggcggatcatgccgatgccgccactcaacgacaccccgcccaacacgcacgccgagatcaccgtcagctcaaagccctgcccaatcatcggctggcccgaggtcatgcgcgaggcgaggatcaccccggccaacgcaccgatcaacccgtgcacggcaaagatgatgatcttggtgcgatcgacgttcaccccggccagcaacgccgcttcctggttaccgccgatggccatggtgttgcgcccgtaggtggtgtagttgagcagccagccgaaaaacacaaagcacagcacggtgatgatgatcggcaccggcacgcccatcaactggccgttgccgaacacgaagaaaccctcatccatcacccccaccgctttgccgttggagaagatgtaggccaggccgcgcacgatctgcatggttgccaacgtcgcgatcaaggcgttgatacgcagcttggcgatgacaataccgttgatcagccccaccaccaggcccatggccaacgccgccgacacaccgagcaccacgctgtcggtatcacggatcacgatacctgcgaccaccccggcacacgcaatcaccgagcccaccgacaagtcgaaatgcccggatgccaggcagaacaacatggtgcacgcggcgatgcccacggtggagatcgccaggcccagcccgcgcatgttcagcggtgaaaggaagttgtcgataaacaacgcgctgagcacaaagatgctcaacgcggcgagcagcatcacccagtcatcgaggaatttgcgctggttgaaacccggccagaagccctttgcagtttttacctcagacatcattcacctcgaattcttcaagcccgcgaacgcgggagagccagttgcaacagccgtgcttcatccgcctggtcacgggcgagttcgccggtcagggcgccttcgctcatcaccaggatgcggtcggaaatccccatcacttccatcaggtcgctggacaccacaatcaccgcaataccgctggccgccaggttatggatgatctggtagatctccgacttggcaccaatatcgatgccacgcgttggctcatccagcagcagtactttcatcggcatcgacaaccagcggccgagaatggccttctgctggttgccgccggacaggtacatgattttctgttcggcgttcggcgtcttgaccttcatgcttttgatttgccggtctgcgttggccttttcccagccatcacgcagcagccagccaaatgcagagtgggcgccacgcgcgctgatattgatattttcggcgacgctggacagcggaatgatgccttccttcttgcggtcttccgggcacagcagtacgccggcggcgatggcatcgcgcggtgaacgcagttgcagggcctgaccgcacagttccaggctgccggcagtgctgcgggtcaaaccactcagcagccgaaacagctccgtgcgccctgccccgaccaagccgaacaggccgagaatctcgcccttgtgtacctgaaggctgaccggctcacgcaagcccgggccaagcaagccctcgaccttcagcgctacatcgccctgttcacgtgggcggtagtcgtagatgtcctggatatcgcggccgaccatgcacgttaccaactggtcgtgggtcagggtgctcatgtcgtcgaaggtgcgcacgtaacggccgtccttgaacaccgttaccgcgttgcagatgcggaacacttcctccatgcgatgggacacgtagagcaccactttgccttcatcgcgcagccgcgtgatgatcgccatcaagcgatcgatctcccgcgccgacaggctgctggtgggctcgtcgaaggcaatcacatgggcgccacgggacagcgccttggcgatttccaccagttggcgttgaccaagggaaagtcgaccgagcttctcatccggatcgatttcatccgccaggcccttgaggcaggccaacgcctgcttacgcaactgactgcggttgaccaccccgaagcgcgtcggcaagtgcccaaggaacaggttctcggccacggtcatttccggcaccaagtgcagctcctggtggatcaccgccacgccgttggcaatgctgtcggcggcagacttgaagtccatggtctgcgcgccgatctgcaacgtgccactgctgggcaggtaggcgccgccaaggattttcagcagcgtcgacttgcccgcgccgttctcgcccatcaacgcatgcacctcacgcggccgcgcttcaaagctgatctgcgccagggctttcacaccgggaaactccttgccgatgccgttgaagcgcaaggccgcgccggtcatttccacaacccgatcttggtcagctctgcctggaagttggcgcgggtgatcagggtcacttcgtccatcgccgtgtatttcgcaggttccttgccggtggtgacccactcatacatcgccaacgcggtgttgtaaccctcgatatgcgggctgggcagcatcgagccgaagaaaccgctttcagcctttttcaactcgccgatggcgtcggtgccattgatgccgatgccgatcacattggcagccttgaagccggcgctttcggtggcgcgtacgccgccgagcacggtgttgtcattcatgccgccgatgatcaggtttttcgcgccgctgggcagcttgaccagcgccgagttggtggcgtccatgctgccgggtacgtcaagggtcttgagcgcggcggtcaggatatggtctttgggcaggccggcgtcttccagggacttgatcgaaccgtcggtgcgcttcttgccggtgtcgagttcgttataggtgttgatcacggcgtaggtgtccttccagtcccagccgcgttttttcgcttcggttgccattgcggcgccctgcttctggcccacttcaaaggcagccatgcccaggtacggcacgtcttccatgaagttgcccttcgcatccacgaagcgatcatccactgccatgactttcaggccattgaccttggccttggcgacgatggccgggccgagggacacgtccggcgggcagatcacaaagcccttggcgccgttggcagccaggctgtcgatggccgagagggttttttcaccgtcgggcacggcgatcttgatcacggtaaagccgtgttccttgccggctttctcggcgaaggcccattcggtctggaaccagggttcttcggcctgtttgaccagaaagccgatcttcacttcttcggcgagtgccacgctgctgaacgccattgcaagtgccagggtgcctaaagtcttcttgaacatgaaccacctctttcttgttattggaaaacgcttcagtcgtggtacatcactgaccgcccgccatcgatcatcaggcaggttgcattgataaacggcgcctcgtcggtcgccaggaacaacgcggtcatcgccacttcgatcggctggccgatgcgcttgggcgggtgcaggtcgaacgcacgctggcgttcggcgtgggggtcggggaaaccgttccagtagtcgacgttgagctgggtttctatgtagcccggcgcgatggcattcacgcggatgcccttgggcgcgtattcgatgccgagggcgcgggtcaggccaagcaggccatgcttggccacgggataggggaagcagccaggaatgatgtggctggaatgggtggaagcaatgttgatgatattgccgatgccctgctcgatcatgtgcggcagcaccgtgcggcagccgtaccaggcaccgtcgaggtcgatggcgaagcagcggcgccagtcttcgtcggtcatctccagcgggtcgcgaaacacattgaccccggcgcaattgaccagcacatccacccggccgaagcgctcgatggccacattgaccagtgcctgccattgttccttggacgtgatatcgacggattgcgcgtagatcttggcgccgtgttcgcgccagcgggccgcgacctgctcgaccttttcgccctggatatcagcgatgatcagcttcgcctgctgcgcctggaaacacgcgacgatcgcctcgccaatgccttgggcggcaccggtgatgatcaccactttgcctttgagccgctcgccgtaggtgggttcgggcacggcggggagtgacaacggttgtgcctgcatcgcttcacctgttttatttttggtagtgagtgctgatgcagccgactataaacccatcttttgaaacatctcaatatataaatttgcatcccatatattgagaaaagagcaaaaaaattgtgggagggggcaagccccctcccacattttgatctacggtctttagcctagggcgaagtcacgcagcgcatcaccttccatgcgatagcgcacccactcctcctgcggctgggcaccgatggatttgtagaacgcaatcgccggttcgttccagtccagcacgctccactcgaagcgcccgcagccgttgtcgaacgcgatcttcgctaggtggcgcaagagcttcttgcccgcgccgccgccgcgttgctccgggttgatgtacaggtcttccaggtacaggcagttgctgcccagccaagtggaataactgaagaagaacaccgcaaaaccaatcggcaggccatcgcgcaaacagatcaggccatgggcggtcgccccttcgctgaacaggctacgctcgatgtccaccacactggcgatcacttcatgccgggccttctcgtactcggccaactcagtgatgaaagtcaggatctgcgcagcatcgctgggcacggcggggcgaatctcgatggtcatgggcgagccttggcaatttcaaagcacacatactaaggcgctttcgtgacgagttgcagcgcaattcgtggtcactggcacacaaaatcttacaggtgacgcaagaccgttcgtcgccacccaggcacgaacatcaaacgagagctgaccaacagtaggtaaggacattcatcatatggagacaccctcatgaagcattccaagtttgctgccctcgccctggctggcctgttgtcttcggtttcgctgagcggttttgcggccacctcctccaccggcccgaccaacccggacgccaccaccgagtcccagaaatccatgggcaccggcctggacaccaatggcggcgcagtcattgacaataccaatgccgctgacccgcacacccagggccatgacacccaacgccaggcaccagctgccgtcggcaacggcaaaatgggcccatcggtcaatgaacccaagatcaacaagggcgatgactcgaacctgcccggcgcgccaaaacagcctgcgccttgatccacccaacgcaagacgaacacccgatcatttcccagtgaagaggtacgcatgaacgtcgacaaagaccttgagaaagaagtcttgacccgcctgctgcacgctcatccccaggggctgggcaaggaggtgttggataactaccgcggagaaaaagtcgtcgccagtgcgttggcgtttctgcaggatcgcggcctgatcaaggatgggcatgtgaccaccgacgccgccggtgaatatgcgttgaacctgccgatcaagctgacggcgtcgggtgtggatgaggcgcgtaagttggagtctgaaaccagccagtagcctcaaatgtgggagggggctttcccgctcccacattttttgacacggcctattcccggagaaaggcgtcgacttctgcgctgccaggcgatgtagccggcccccagcgagtcaccgccagcgccgctgccgcgttcgcccggcgtgcagcctgggcaggtgccaggccatcggccaaccctgcgataaacaccccggcatgggcatccccagcgccattgctgtccaccgccgtcaccttcaaccccggcacatgctcggcctggccattgcggctcacccagcagccattcggcccatcccgcaccaccagcaaggcatcgccgggcagatgacgattcaagtcgaccagcgcctctgcaaccgtttccgccccggtaaacgccagtgcttcagggccattactggtccagatatcgatacgcggcaacagcgccaccatcagcgccgaatccggtgccttcaccaacggacccgggtcgaacaccaccttgatagcgcgaggcagcgccagcaaccagtcgagcagagcctgcgccttgccttccagcaacaggctgtagccactcacatacacgtaatcgtccggctgcgggaccacgcgcgccaggtcctcggcgctcaactcgccttcagcaccgatatgggaaatgaaggtgcgttcggtggtggcctcggtcagcgacacacacaaaccggtatctttatccgtgctggccgcttgggcaatctcgacaccttccgcctgcatcgccgcgcgtgccaggtcgccgaaacgcccgttgccgtgacggcccaggtagaccaccgccagcccattgcgccgtgcggccgccatcacattgaagccaccgccggcttcgaaactggccgattgcgccagcacgtcgccaccggttgcgggcaaggtatcgagggccatgaccaggtcgacgatgacctggccggtgtgcagcaatctagacattagggctctctactaaagccgggcgacgatcagccgcaccgcccagtactgcataaatcccgccggccaccagaaaggtgacgatccagcccaggccgttgtggcccagccaggagtcggacaaaggcccggcgaaccagatgttctcggcggtggtgccgatggcggtgaagctgaaacccagcacgatcgccacggcccaggcaccgaaggcacgccactccacaccgccgcgataccagtaggcgctgcttgggctcacgtccagcaggtccttggcgctgtagtagtgacggtggatcaggtcgaccacgaagatgccgacccatgccgtgatcggcaccgccagcaaagaaatgaacgtgatgaacgggccgtagaaactgtcggcgatcagcatgaagtaaatcgaaccggcgaagatcgccacgatatcgacgatcaccgcatgcacgcgcttgaccttcaaaccgagggtcagggtggtgaggcccgccgagtacaccgataggttgttggacagcagtaacccgccgaacgcggtgatcaggtacggcacggccatccaggtcggcaacatatcgcggatcgcgatgatcgggtcggtcgccgacgccaggtcattgttgcccaccgacagcaggccgccgagggtgatcaacagcaccagcggaatgcccgcaccgaacgccgccgacgccaccaggcgcacggccttgacgctgcggtgctggtagcgcgacatatccgcgccggcgttggcccagccgataccggtgccggccgccatggtgccgacgccgatgatcatcgcgctcagcggtgccggggtggcgttgaacaccgcgctccaatcgatggtggcgcagaggaaaccgccgaccaggatgttcaacgcgccgaacacataggtggcccacttctggatcaccagcaaggtggcgtggcccaggccggacaccgacaaggtcaacagcacgaagatggcgatgaagaccagggtgagcaccggcgcgcttttggcttcgaccggcgaaccgaacaggatcgagcacaacgacagcagcacaaaggcggcggtagtggtgttgacggtttcccagcccaggcgcgacatcagcgacaccagggtcggcccgatattgccgcgcacgccgaagatggcgcgggacagggtcaggctgggcgcacggccacgacggccggcgatagaaatgatgcccaccaccgcaaaggagccggcggcgccgaggatcgcaacgatgatggcctgccagatcgccaggccgcgaaacgcgaccagggtggcgccgagcggcaagccgaggatgctgatattggccgcgaaccacacccagaacagttgcagcgggtggccattgcactcgccttcaggaaccggttcgatgccgcgtgtttccaattgcccggcgctttggccggaagatgtgctgctcatgagagggtgctccaagtgcctgtattgttgtggttgtggcaggtatacaaagcgaatcttccggtcgtcctgactcagcgcattttcaacaattcttcaaccagcgactgcagatccaggccattgacctgcttgacctgttcgatcagcgcctcaggccagcactgcatgcccaggcacgcaccgagcatggcgccgagaatcgcggcgatggtgtcagtgtcaccgccaagactggccgccaggcacagcgcctcgaaagcactcatctcgcccaccgccacttgctgggccagggcgaacgacaccaccaccgactcctgggacgcgacggaggtgccgatcaattcgtacagcaggtcggcgaacagggccttgtcgccgctgccgacgctcaaggtccgcgcccagctgatgcgcgtggacatccgcccacccgcgatccagtgaccatggccttcggcctgctgggcaacctgggtgccgatgttcaacgcttcgcccaggtccacaccgttgattccggctgataccaccgccgccaccgccgccgcgctggaaatacccagggtggtgttatgggtgacctggcaggcctggattaccgcctggataaactgcgccgggtcgctgacatcggcggcaatccccactggcgtgatgcgcatcgcggcgccgttggtggtgccgtaacgtccggattcttccggggtgtggccggcgaggatcatgtcgatcgcacgcttggtggaggggccgagcaaatcctgggaacccttggcgcgcatcaccgcttcccagtcgatcaggcgctgggcaagcacagtgggttcgatcttgcctcggccttgcacgagtaactcacccaccaggatggcctgttcggtgtcatcggtgatggagccggcgggcatgttaggtgcgatgggctggtcggcgtcggcgtgttccaggccggtgatggcaccgaaacgcgcgcgcacctgttcgcggctcagggactgggtcggcatgcccagggcatcgcccaaggccaagccgtagaaggcgccgagggcgcgattgagcggggtcatttcgagtttccaaattgcaggtgcaggcgaaagtgcagaggatcgagcaagctttcgacgtactccatgaaacgctcgcgacggtcgtaggtggtgcgcgaggccttgaggaacaccgtgccggctgggcggccaagcaactcggcatcttcatcgctgaggggctctgcaccgatccattggtcgccttcggcgccgacataaccgtaggcagccagggtaatggtcagggaatcatcgatcaggccgactctcggcaggccctccaggcctccggaagcgggcatcagcgagcgttccagggacacggcagtgccgtcagtggtgcgacggcgacggtcgagggcaatgaattggtcgctgccaaaacggctgaacaggtccgggcgggtcaccgcttccaggcgcaggatatcggtgttgaccttcgcaccggtgtccgccagggcttgggcccagccactgcgctggtcgagcaccatgccgtcaaaagtgacgatggagccgacgccgctctgggtcgcaatgtagttacgccgcttgagttcagcgagggcctcacgcagggtgccgcggctgaccgcgaactcttcggccaactgatgctcgcccggcagcaggaaaccgtcggccatcaccccaccctcgatacggcggatgagttcgtcgacgacgcgttttttcttatcaaatcgaacatgtctaatcatgtacaaattgataacgcaaagcgcccatgtgcagcaagcgaattatttcagggagatgataaaaccggcctcagggctccaggccaatagggaaaaactcccctgcgctccagacgcccagccagttctgaccgttgatcggacggctcactgccaactccaccaattggtagaacgcattgcggtgcaccagggcttcgaggttgctgcgcactcgcagatagggagcaggctcctgggtcacagggtcgatcaccacccgcagcgggtgttcgaggccggcttcgacctggtcatcgacattggtggtgaagcgcagcacctggctttcgccctgcccttcgacttccagggtaatggcgacaaacggcgcatcatcgacggtgatgccgactttttctacaggcgtaatcaggaagtaatcatcgccgtcgcggcggatgatgttggagaacagcttgaccatcggcatgcgcccgatcggcgtgccctggtagaaccaggtgccatcacgggcgatgcgcatgtcgatgttgccgcagaagtccgggttccacaggtgcaccggcgccggtcccttgcctttgggcagttgggccaacaggtcgttggccttggcggaatcggtcatggggttctcctgggtcttatggattgctcatccccaacaggccacgggcgtactgcgccagggggcgggcaatcaggtcttgtggcttgttgtcgtgaaacgtcagtaaaccgccacgactgcgtatacgtgcagtatcaatcaaatactgggtgctggtctcgatcaacatgatctggatgacgccgctgtccaggcctacgcggtcgagggcttcctggtcggcccattcatccgcgttgccgatgcggtcatccgccttggcgaaacggcagtacagcaggtagtgagcccccgccgcacgggcttcggccatggcctgctccagtccttcgggttgacgggcgcggcgcaccatggggaagtactcgacaaaaccattgaaggcttcttcggccaccacgttcggccgcggataggcactgcccggcggcacaaaggcgccctgggcgataaagacgaaggagtccggctgtatgcgtaccgaggcggtacggcgggtatcgctgtggtcgagcaaaccggcgtcgctcatctgatagcgggtgccttcggccatatcgctgacggtcatgcagccactcagcgtcaacgacgccagcaacaaaaccagactacgcatcctaatcctccagaagccggtgacggaaaaccggcgaatgggcgtgtgatgcaggttctgcgccatttggtagcaacctacaacaaatgtgggagggggcttgcccccgatagcggtgtatcagcccactcatgtgtagctgacccaccgttatcgggggcaagccccctcccacatttggttttgtgctgtctgagcgggttggttagccgccgatgatcttcatgatggttgcaccgcccgagaaggccacttcctgtttgtcgcccagggctttcatcaacaggccttgcaacgccggcagcgcttgatggcgcggcttgtccagcaggtcgccgacgtagtggcggttactcgacgacaggcagccatgcagccagccagtggacgacaagcgcaaccgcgagcaggtgcggcagaacggcacgctttcgttggcgatcacaccaaagaaacccttgcccggcacttcgtagcgtacggccgtggcgtccacgggggcgttggcttgcaggtattcatactgttcgccgatcaggcccagcagttgttgcaggctgacaaactgctgcaggaaggcgttggagtccttggccaagtggcccatgcgcatcaactcgataaagcgcaactcgtagccacgctccaggcagtagtcgagcagcggcatgacctggtcgaggttctggccgcgtaacggcaccatattgaccttgatcttgatcccggcagcgcgggcctggtccatgccgtcaagcaccgtggccaggtcgccaccacgggcgatactacggaaggcatccgcatccagggtgtcgagggacacgttgatgcgcttgatcccggcttccaccagcagcggcagcttgcgcgccagcagttggccgttggtggtcaggctgatatcgctgagacccatcccccccacggcgcccatgaaagcttccagcttggggctgaccagcggctcaccgccggtgatgcgcaggcggtcgatgcccgccgcttcgatcaggtattccacaccacgggccatagcctcggccgagagttcgtcctgggcagccaccagccgcttgccgttgggcacgcagtaggtacacgcgtaattgcaggctgaggtcaggctgatccgcaaattgcgaaaacgcctgccttgacgatcaacgatcatggatcactccggcagaggatgaatcgggcgcgctaaaagctgactgataaatcagcttttagcaagcgtccttgcctgagtatattcctggggtactgcgcgtggcagcaaatcattacgtggcaggcgtttgggccggcgccgcttcaatcgccggcggctcactgctgtgcttgcgcttgttgcccatgcgcacgccgatatccatcaaaaactggaagaaaccttcctgatcttccagcacgttgctccagaacggcgagtggtacagcgccacggcaccgtgcaccagggcccaggcggcgcagtagtggaaatacggcggcacatcttcaagcttgccttcactgatacggcccttgatcagcagggtcaggcgttcgaagttcgaggcgcggatcttgtgcagttcctcgaccatctccggcacctgatggcccttgaccaccttctcttccagccggtcgaacaggcgatagcgctgcgggtcacgcatgcggaactcgaagtaggcacgggacagggcttccttgtccttgtcgacgtcggccgaatgcagcagctcgttcaagtcgcgctcgtagtcgagcataaggcgcaggtagatctcggccttggacttgaagtgcttgtagatcgtgcctttgccgatacccacggcatccgcgatcatctcgacggtgacgctgtcttcaccttgttcaagaaacagcttgagtgcggtgtcgagaatttcctgctcacggcggcgaaactcacggaccttacggggttctttgtgcatgaggaagaggtctgcaaaggtcggattagggagggttgcgcagggccacggatacgtggcgatacgatttacccggtgcgagggattatcccgactgaacggtcgttgggcaatgtctatgtgaacccgtaacgcactttactttcagcgcgccaacgttttcattgatatcagtcagaaataatacgcaacaactacacccgtacaccggactgatgagaactcaagcgaagcgcgcgtattccaaatctgtttaaaaaacgatcagtcgcgactggactgaatcggatactgatcaatacttgaactgtcggcgtgacatctcccccaagtgaagcgccgacctgggtaccaacggaccgcgtacccttgttttactcctaatggtcttaacccggattcaccccccagaacccgggttttttttgcctgcgatttgaccttcgcgttaagaggcgacgtgggccagcgggaacaggcgcttgaagttttcggtggtctgctcggcaaaacgctcgtaggactcaccgcgcagcatcgccaggtaatccgccacgtcgcgcacatactccggcaggttcggcttgccgcgatgggggataggcgccaggtacggcgaatcggtttccaccagcaggcgatcggcgggcacttggcgtgcgacatcacgcagggcgtcggcgttgcggaaggtgacgatacccgacagggaaatatagaaccccaggtccagcgccgccttggccatgtcccagtcttcagtgaagcaatgcaacacgccggcctggggcaatgctgcttcgcgtagcagggtcagggtgtcggcacgggcgccacgggtgtggacgatcaccggtttaccggtctgccgggcggcttgcaggtgcaggcggaacgaagcctgctgcaactcggcggcttcgggttcgtagtggtaatccaggccggtctcgccgatggccaccacgcgcgggtgattgagctcacccagcagccagtcgagtgccggggcttcaccgggcttgaggtccagcgggtggatacccaccgagcaatccacatcggcataacgctcggccagggctttgacgtccgccgcattctccgcgctgacgccgatgcacaggaagtgccctaccccacgctggcgggcggcgtcgagggcagcgtcaagggagccgccgtgctgggccaggtcgagacgatcaaggtggcagtgggaatctacaatcataggcatctacaacttcagtcacgaaaagtgtctggccgacgatacacccgccggccacggaaattaacggcgtccgagcaaaccgacccactgcaccagcaacgcttcgagcagcagcacgcggttgaggttggccttgccgagcaccttctggcgctgggcgaggatccagtcctgaatcgtcagcaccttgtcctgggcacttttctgcgccaggtattgcaccaccttgcgcatatccggcaggcccaggccgttttcatcctgggtcagctggtagcgcaagatcaggctcgaccaatcgcagaaccagtcgaacagcaacagcagggggatgtccttccaggcgttttctgccaactgggtggcggacacttcctgcttgatcagtttcttgaccccctccaccaccagcgcacgttgttcacgcacgccctgggcctgcagcttcacggcggccaacggcgaaccggcggccagggtcagcagctcgacccgttcctcctgggagcactccggcaacgcctgcgccagccacgcaaggctcatggcctcgcttggcagcgggcaggcctgctgcacgcagcggctgcggatggtgggcaacaaccggctcgattggtggctgaccaacaacagcacggtatcgccggacggctcctccaggcttttgagcaaggcgttggcagcattgacgttcatcgcctccaccggctcgatcagcaccaccttgcgcccgcccatctgtgcggtctgcaccacgaagctgaccaggtcgcgcacctggtcgaccttgattgccttgtcggcctcttcgggctccagcaggtagttatccgggtggctgccggccttgagcagcaggcaggatttgcactcgccgcaggcttcaagcttgaccgggcgctggcacagcaggctggccatcaggcgctcggccaacgctcgcttgccgatccccaccggcccatgcaataggtaggcgtgggcgtgctgggcacggccggccagttgttgccacaggctgtcctgccacgggtaggcttcagccacgggcgcgctccagcagtttgggtagcagcgcgtcgatggcttgctgcacctgcgccagcggttgggctgcatccagcagggaataccgcgcgggctcagccttggcccgtgtgaggaatgcactgcgtaccgcgttgaagaacccatcgccttccagttcgaagcggtccagacggccacgagcactggcgcgggccatgccgacttccaccggcagatcgaacagcagggtcaggtcagggcgcaagtcgccctggacaaaggtttccagggtggcgatgcgctccacggacaagccccgaccgccgccctggtaggcataggtggaatcggtgaaccgatcgcagatcaccacggcaccacgggccagggctggacggatcacctcggcaatgtgctgggcacgggcggcgaacaccagcagcagctcggtgtccgggttcatctgctcgtcacccggcgccagcagcacttcgcggatacgctcggccagcggcgtgccaccgggctcgcgggtcaacaccacctcgatgccttcgctgcgcaagcgctcggccagataatcgcggttggtgcttttgccggcgccttcggggccttccagggtaataaacaagccagtcacaggcagtccttagtcagaattattgcgggctttgcggcgcgggttcagctggcgtatcagcaggcacatccgccggtggtgttgcgtcttcggcaggcttcaccaccggcgccgggctggagcggtaatcggcgcgccgcttgagttggaactcacgcacggcggcattatgcgcatccaggttatcggagaaaatgtggctgccgtcgccacgggcgacgaaatacaggctgctgcccggcaccgggttcagcgcggcatggatcgcctcgcggccgaccatggcgatgggcgtcggcggcaggccggcaaccatgtaggtgttgtaggggttggcttccttgaggtgcgcgcgggtcaacttgccgttgtagcgctcgcccaggccgtagatcaccgtcgggtcggtctgcagcaacatgccgatcttcaggcgccgtacaaataccccggcaatctgcccacgctcttcaggcacgcctgtctctttctccaccagggaggccatgatcagcgcttggtaagggtcggtgtaaggcgcgtcggcagcgcgcttgctccactcctgggcgagcacgtcgtccaggcggttgtaggctttcttcaggaattcgacgtcggtcataccgcgcacgaaacggtaggtatcggggaagaaccgcccttctggaaacacgccagggtgaccgagcttctccatgacttcgctgtcactcaggcccgagagggtctgcacgatcttttcatgcttggccagcgccgagcgtacctggcggaagttccagccctcaaccagagtcaggctgtattgcaccacttcgccacgctgccacaggccgatcaggccctgcgccgtcatgccgggcgtcatgcggtattcgccgctgtgcaatggctggccgtccaggttgaagcgccagtacaggcgcaaccagaaggcaccgtccagtacgccgtcagcttccaggcgattgaaggtgccggtgggggtcgcccctgccggtacgtcgagcaattgctcctgggtcaggttcaagggctgcttcagggcagcgtcgtatttccaggcgccatagcccaacagcaaagccgccgagaacagaccgaccagcagcagtacaaccagttttcgtatcaactcagatttccaatagcgcgcgaacaatgccctgcagtttacgggtgagcgggccaaccgaccagctcatcgcagcgcactcgcgcaccggccaaatgccataaacgctgttacacacgaagacttcgtcggcttgctgcaactgctcaatactgatgtcggccacggccaccgggacgcccagggtctgtgcctgggccagaatctcggcacgcatcaccccggccacgccgcaacgcgtcagatcagcggttagtaacaagccattgcgcaccaggaacaggttgctgaatacgccttcgatcacgcgaccggacacatccagcatcaacccttcagcgtgctcggcgtcctgccattcggcacgggcgatcacctgttccaggcgattgaggtgcttgagaccggccagcaacggctgttcggccaagcgggtggcacagggaaacaggcggatgccatcggttccatgagcgctgggataagtagcaggcgggctgccctgcaagatacggcgcaccggtgcgccagggttgatgccataaccgcgcaggctgtcgccacgggtcaggatcaatttgaggacaccctcgccaagggcggtggcgtaggccagcacttcgctgcggatcaacaccggatccgcaaccaaggcgaggcgcctgcaaccctcgtcgaggcgttgcaggtgacggtcgagcagcaccggctgcccggcctttacggcgatggtctcgaacaacccatcgccatacgccaggccgcgatctttcaggggcacgctgtccgctggctgaccgtcgacccagctgtgcatcactcggcgaaccggcggaacaccagggaaccgttggtgccgccaaaaccgaacgaattggagatcaccacgtcgatcggcatcggctgcgcttcgtgtggcacgaagttcaggtcgcagccttcgtcaggctcatccaggttgatggtcggcggcgcgacctgatccttgatggccatcacactgaagatcgcctcgaccgcgcccgccgcacccaacaggtgaccggtcatggacttggtagagctgaccgccagcttgtaggcgtgctcgccgaataccgactttatggcctcggcttccgccagatcgcccgtcggagtcgaagtaccatgggcgttgatgtactgcacctggtccgcattgaccttcgcatcgcgcagggcgttggtgatgcaacgcgcagcaccggcaccgtcggacggcggcgaggtcatgtggtaggcgtcaccgctcatgccaaagccaatcagctcggcgtagatagtggcaccacgcgccttggcgtgttccaactcttccagcaccagggcgccggcaccgtcggagagtacaaagccatcacggcctttgtcccatggacggctggcgcgggtcggctcgtcgttacgcgtcgacagcgcacgggacgcgccgaagccgcccatgccgaggccgcacgccgccatctcggcgcccccggcgatcatcacgtcggcttcgtcataggcgatattgcgcgccgccatgccaatgcaatgcgtgccggtggtgcacgccgtggcgatggcgtagttaggtccctgtgcgcccaggtggatggacaggaaaccggaaatcatattgatgatcgagcccgggacgaagaacggtgaaattcgacgggggccggaatcgtgcaacgtgcggctggtttcttcgatattggtcaaaccgccaatacccgaacccatggccacgccgatacgatcacggttggcgtcggtgacttccaggccggcattgcgtaccgcctgaaaaccggctgccaggccgtattgaatgaacaggtcgagtttgcgggattccttgaccgagagatattcctcgacattgaaaccctttaccgagccgccaaaacgggtggaataggcagaaaggtccgtgtgttcgatcagaccaataccactgcggccagccagaatgccctgccaactgcttggcacatccgtgcccagtggcgacaacatacccataccggtgactacgacgcgtctacgcgacacagcactctcctttttctaatgacgacacttttgcttcagcgcgtacttttcatcagggctaaagaaaaaaccgcacgccgttacagcagtgcggtttttccctgacagcaagcgacgactacaaactattacgcctggtggctagtaacgtagtcgatagcagcttgaacagtagtgattttttcagcttcttcgtccgggatttcggtctcgaattcctcttccagagccatcaccagctcaacggtgtcaagggaatcggcacccaggtcttctacgaaggaagcagtgttgaccacttcttcttctttaacgcccagttgctcggcgacgattttcttgacgcgctcttcgatggtgctcataccttgtttaactcctaatggacaaattcaggcagctggccagtgggtaagtgtatagaaagccttttcagcttttcaactgaaagcttcaccctgtacccggtcggccacctgcctataaattaagttgcagctttataacggattttagacagctcgtatgacatatttttgaagcgatccgtcacaatttaactcatgtacatcccgccgttcaccgggattgtagccccagtcacgtatgccgcaccgtcggatgccaggaaagtgaccacattcgcgatctcttgagcctgacccagacggcccagcggaatctgcgtcagcaacgcttcacgctgtgcttccggcagttcgcgggtcatatcggtgtcgatgaacccaggggccaccgagttgaccgtaatcgaccgcgagccgacttcacgagccaatgcacggctgaaaccttccagaccggccttggcggctgcgtagtttacttggcctgcgttgcccatggcacccactacggagccaatattgataattcggccccaacgcgccttggtcatgccgcgcaaaacgcccttggacaggcgaaacagactgttcaagttggtgtcgaccacgtcgtaccactcgtcgtctttcatgcgcatcatcaggttgtcacgggtgatgccggcgttattcaccagaatcgccggcgcgccgaactgtgcggtgatctcggccagtacggcagccacggactcatcgctggtcacgttcagctcaaggccggtgccttgcacgccgttttccttcagggtcgcggcgatacgctcggcgcccgaggcggaagtggcggtgccgatcacaacggcgccctgacggcccagctccagggcgatcgcctggccaatgccacggcttgcgccggtgaccagtgcaactttaccttgcagactcatgcaggcttctcctacgttcagggattcaggccagtgccgcgcgagcggcagcaaaggcgtcaggggtattgaggttggcagtcgacacgccgtcggcgcagcgcttgttcaggccggccaggactttgcccggaccacactcaaccagctcagtcgcaccattggcggccagggtctggaccgattcaacccagcgtaccggcttgtagagctgttccagcaggtcgctcttgagggtatcgaggtcagcagccacggcggcgctgacgttctgcaccagcgggatctgcggcgcctgccagttgatggcggcgatggactcggcaaaacgctcggcagccgggcgcatcagctcgcagtgcgacggtacgctcaccggcaacggcaacgcgcgcttggcaccacgggccttgcagccttcgatggcacgctcaacggcagccttggcaccggcaatcaccacctggccaggggagttgaagtttaccgcgctgaccacttcgccctgggccgcttcggcacaggcctcgatcaccacagcgtcgtccaggcccaggattgcggccatgccgccctgcccggccggaacggcttcttgcatcaattggccgcgacgctccaccagcttgaccgcctcacccaaggtcaggctacccgccgcaaccagggcgctgtattcgcccaggctgtggccggcgacgaatgcagggcgtgcgccgccttccgccagccacaagcgccacagggcgatcgaagcggtcaggatggccggctgggttttatcggtttgattgagttgctcttccggcccttgttgggtcagtgcccacaggtcgtaacccagggcgtcggaagcttccttgaaggtgtccagaatcagcgggtattgcgcgctcagctcggccaacatgccgagggactgcgaaccctgccctggaaagacgaatgcgagggatgtagacatgtaacaagcccctaatgatctggtcgtcaaaaaagcgcactcctacagtgggagcgcacgaaactgacagattggatggtcaattgaactggccggtcacatttaagcactcccgggccgattcgcctaaggcaacaggtcctcgagacggccatgcaagcgttgcggcaggttttcctgaatctcgatcacagcccgcgcgatcgcactttgaaacccctcgacaccggccgagccgtggctttttactacaatgccctgcaaccccagaaaactcgcgccattatgccgtgccggggccaggtccgcctgcaggcggcgcatcagcggcagcgccagggcaccaaccaggcgcgacgccaagctctgcttgaacagcgcttcgatacgcgtggcgatcatggtcgccaggccttcgctggatttgagcaggatattgccgacaaacccgtcacacaccaccacgtccgcttcgccacggtacaagccgtcaccttcgacaaacccgacgtaattcaacccccgcgcgccttgcagcaacgtggcggccagcttgacctgctggttgcccttgatgtcttcggtgccgatattcagcaaggccacccgtggccgggccacgcccagcgcttcggcggccaccgagcccatcacggcaaactggagcagatgctcggcgctgcaatcgacgtttgcgcccaggtccagcaactggcaatagcctttctgcgtcggaatcgccgccaccatcgcgggccggtcaatgccgggcagcgtcttgagcacaaaccgcgacaacgccatcagggccccggtattgccggcgctgacacaggcttgcaccttgccatcacgcagcagctccagggccacccgcatcgaagagtcaggcttgccacgcagggcggccgccggcttttcatccatggtgatggtttcgctggctggcgtaatcgtcaggcgcgcgcgatccaccgccggatggctggcaatcagttcttcaagtaaggagggttgaccgacaagggtcaggtgcagcgagggtgttgcagacaggctggcaatgcaggcctgaacaatgctgcggggaccgaagtccccgcccattgcgtctatcgcgatgactagagcagacaagtgattactcgtcagcgcccttgtcgatcactttacggccacggtatacgccttctggcgatacgtggtgacgcaggtgaacttcaccggtggtcttttccacggacagggtgctagcctcgagagcgtcgtgcgaacggcgcatgtcacgggcggagcgggattttttgttctgctgaacagccataattgattaactcctaaacgtttgggtcacgctttaactgcgccaatacactgaacgggttggaccgcgttacctcgtcctcgctcggttcgggctcgtcatcgaggcccgccggctgctggcattcttccggatgatgagcaggcacaatgggcaaggcgagcagaagctcctcctcgatcagtgcatgcagatccaaaggatcttcgcccagttccagcacgtcataacctttcggcaacgactgggtattcgcaccctccttcaccacagcataactgcactcgctgtggatcggcagggtgaccagctcaagacaacgctggcaaaccattttgacctcggtgtcgataaaactgtggattaccacagatttacgttcatctcgttcaaaaacgaatttggcctgcaccgtaccgacagtgtcggaaagcgggtcgcagagtctctccaaatcggccagcagcaactcaccttgaagggaagtgccacgatcagccaatttgcgcgggtcaacgtgaggtggaatcgggtcattcaacataggcgcagcattatagggatgcacccagccatgtcaaaggaaattcagccctgtgcgtcagccggtcgccccgctagaatccgctgccgacctgaggagacgcccatgctgcccttattactcgcatccagctcggtgtatcgccgggaattgctgagccgcctgcacctgccgttcatctgcagctcgccggatatcgatgaaagccaccgcgcaaatgagtccgccatcgaactggtcaagcgcctggccgaacagaaagcccgcgcccttgccgccagccatccggggtatttgattatcggctccgaccaggttgcagcgctcgacggacggatcatcggcaagccgcacaccttcgaaaacgcccgcgagcaactgctggccgccagcggcaagcgcgtcagttttctcactgggctggcgctgctgaacagcgagacaggcagctgccaggtcgactgcgtgccttttacagtgcacatgcgtgagttggatgccgagtgcatcgagcgttacctgcgaattgagcaaccgtatgactgcgcgggcagcttcaaggccgaggggttgggcgtgagcctgttccaaaataccgaagggccggacgccaccagcctcatcggccttcccctcattcgcctggtggatatgctgctggccgaaggcgtgcaaattccctgagaacaccacaagcaaatgcgggagggggcttgcccccgatagcagaggatcagccaactaacccgcagctgacccaccgcaatcgggggcgagccccctcccacattttgatctatatgtagcctggggctcagcgcaggcttgggccttggaagcccatgtaaaaggccagcttctccgccacgctggcaccgagccgcttggagaaacgatcaaacggcgattcctcaaccgtgaaatccaccagttccttctcgccaatcacatcccgcgctaccgaactggcactgcccaggccgtcgatcaagcccagcggcaaggcctgctcgcctgaccagaccaggccggagaacagttccggatggtccttgtccttcagacgatccccacgccccagcttcacgctggcgatgaactggcgatgagtggtgtcgagcacgccctgccagaactgggtttcatcggctttttgcggctggaacggatcaaggaacgacttgtgttcacctgaggtataagtgcgacgctctacccccagcttctccatggtgccgacgaaaccataaccggccgccgtcacaccaatggagcccaccaggctggccttgtcggcgtagatctgatcagcagcactggcaatgtaatacgcaccggaagcgcccaggtcggaaatcactgcatacagcttggtatccgggtgcaggccacgcaggcggcggatctcgtcatacacataacccgactgcaccgggctgccacccgggctgttgatgcgcaggatcacacctttgaccttagggtcttcgaacgcggcacgcaggctgctgacgatgttgtcggcgctggctgactccttgtcggcgatcaccccgcgcacttcgatcagtgcggtgtagttggcgccacgggttgcgcttttctccatatccatcagcggactgaacagcgccagcatgccgatgagccagacaaacgtcagcagtttgaagaaaatcccccaacgccgcgcgcgacgctgctcttggacgctggccaggagagtcttctccagcagcttccagcttttgtcatcactgctttcagccttttcgggcgctttccactcgtcactcatgccatcaaccccagcaaagacttattgggcctggttgagccaggcctgcaattcggaaaaatgatcgatcgtcagtcgcggttcatattgctgcaacgcctcggcagcctgggcgccatagctgaccgccacgccgtccatgcccgcattgcgcgccatcatcaggtcgaaggaggcatcgcccaccatcaaggcctggcgtggcgacacgccgcaatgagccaggatctgctccagcatcagagggtgaggcttgctggcagtttcatcggcggcgcgggtgatatcgaaataatcttcccaaccgtgggccttgagcacccgatccagaccgcgacgggccttgccggtggcgactgccaggtgataaccctgggcacggaatgccgccagggattgcaccacaccgtcgaacagcggcgagggcgtagcctccagggcgatgtagtgatcggcatagtgttcgcgaaacgcgaccagttcagcgtcgctgatctcgggatacagggtacggatcgcttcgggaaggcccagaccgatgatgcccttgaccgccagatcactgcacaacgcgtaacccgaacgggtcgatgcagcgtgcatcgactcgacaatccggccaatggagtcggccagggtgccatcccaatcgaatatcagcagtttgtagtcaaggtgcgacactcaagcgctccacggtcttggcccacatctcatcgaccggcgcctgcagcttcaattcgccaccatcgggcagcggtaccgtgagcatgtaggcgtgcaggaacaggcgcttgccgcccaggtcgcggatctccttggagaaatcctcgtcgccgtacttggtgtcaccggcaatgcagtggcccgcatgcagggtgtgcacgcgaatctgatgggtgcgcccggtgaccggcttggcctcgaccatggtggcgaagtcgccgaaacggcgcagcaccttgaacagggtcagggcttccttgccctcctcgtccacttcgaccatgcgctcgccggagcgcaggttgctcttctgcaacggcgcgcggacgctcttgatcgagctggcccagttgccgcgcaccagcgccatgtagcgtttgtctacgccatcgccgcgcagggcggtgtgcaggtggcgcaacatgctgcgtttcttggcgatcatcagcaggccggacgtgtcgcggtccaggcggtggaccagttccagctccttggcatccgggcgcaactgacgaaaggcttcgatcacaccgaaattcaggccgctgccaccgtgaaccgcaatgccgcagggcttgttgatcacgatcagcttgttgtcttcgaacacaatcgaggcttccaggcgctgcaacaagccctgggccaacggcacaggctcgtcacgctcaggcacgcgcaccggtggcacgcgcacgatatcgcccgcctgcaacttgtactcgggcttgatccggcccttgttcacccgcacttcacctttacgcaagatgcggtaaatcaaggtcttgggcacgcctttgagcctggccaggagaaaattgtcgatgcgttggccggcatattccggcgagacctcgagcagctggacgctgggggtctggggggcggtagtcgtcatggcggcgatgataacaattttttatggaattgaagcacttaatcattgctgctatagtcgcgaacgccgccaaaagcggcctggacagaggacatgcggcaaactgccggccctgaccatcgcaattcatcaggacgcgaggccgtcctacggggctttcgccaccctggaaggctcaagattgtaacaagcgcaggtgacatgaggcctgaagcgagtgcagaaagcagagtgaatactcgcgttttgcgccgatatttacggccagttcacaaagtgcagtcagtcttgagccagaccacggcgaatacttcggaaacaacgcctgttaagagctgagtgagagcgcaaccgcccacacctagtcttgtttagccatgagcgtggactccccattggagaacacggtaaatgccaacccgctgcggattctgcgcgcggcagcacccgaattatcagggatacgtgtagggtggagatgcacaaccgtcggaccgtgtagcactaggcttatatttagacgcttcatctcgtccacagtcgccggttgattcctcctcctgaccttagcttttgttgaagtggtgcctttgtcaccaccgctaacaagcaggacgcgtccgtcgcgataccggcccaattggctcgttattgctggacactggagtggccaaccactcttgacgcacctgacaccgaccgtgagaagtcgtgtgtgccgaacgccgtttccggcagcccggaaaccgacggtacaacatgaaaagaatgctgattaacgcaactcaacccgaagagttgcgtgttgcactggtagatggccaacgcctctacgacctggacatcgaatccggtgcacgcgagcaaaagaaggccaacatctataaaggccgtattactcgcatcgaaccaagccttgaggctgcctttgtcgatttcggctccgagcgccacggcttcctgcccctcaaagaaatctcccgcgaatacttcaagaaagcccccgaaggccgcgtgaacatcaaggacgtcctgagcgaaggccaggaagtcatcgtccaggtcgaaaaagaagaacgtggcaacaagggcgccgccctgaccaccttcatcagcctggctggccgttacctggtcctgatgccgaacaacccacgcgccggcggtatttcccgtcgcatcgaaggcgaagagcgcaacgaactgcgtgaagcgctgaacggcctgatcgcaccggccgacatgggcctgatcgtgcgcaccgccggcctgggccgcagcagcgaagaaatgcagtgggacctcgactacctgctgcaactgtggaccgccatcaaggaagcctccctggatcgttccgcgcctttcctgatctaccaggaaagcaacgtgatcatccgcgccatccgcgattacctgcgccaggacatcggcgaagtgctgatcgacagcgttgaagcccaggacgaagccctgaccttcatccgccaggtgatgccgcagtacgccagcaagatcaagctgtacgaagacagcgttccgctgttcaaccgtttccagatcgaaagccagatcgagaccgccttccagcgcgtggtcgaactgccttccggtggctccatcgtgatcgacccgaccgaagccctggtgtccatcgacatcaactcggcgcgcgcgaccaaaggcagcgacatcgaagaaaccgccctgcagaccaacctggaagcggctgaagaaatcgcccgccagctgcgcctgcgtgatatcggcggcctgatcgtgatcgacttcatcgacatgaccccggccaagaaccagcgcgccgtggaagaaaaagtccgtgaatgcctggaagctgaccgtgcccgcgtacaggtcggccgcatctcgcgcttcggcctgctggaaatgtcccgtcagcgcctgcgtccgtccctgggcgagagcagcggcatcgtctgcccgcgttgcaacggcaccggcatcatccgtgacgttgaatcgctgtccctggcgatcctgcgcctgatcgaagaagaagccctgaaagaccgcaccgccgaagtccgcgcacaagtgccgattccggttgcagctttcctgctcaacgaaaaacgcaactcgatcaccaagatcgaactgcgcacccgtgcccgtatcgtcatcctgccgaacgaccacctcgaaacgccgcacttcgaagtgcagcgcctgcgtgatgacagcccggaagcccacagcggccagtccagctacgaaatcgccgcagctgccgccgaagtcgaagaagtgcagccagccgccgcgacccgtaccctggtccgccaggaagccgccgtgaaaaccgctccggcccgtgccaacgcaccggttccggttgaagccgccgctccgattgccgccccggccgtaatgcctgagccaagcctgttcaaaggcctggtgaagtcgctggtgagcctgttcgccaccaaggaagaacctgctgcaccggttgtggttgagaaaccagcgaccgagcgccctgcacgcaacgaagagcgtcgtaacggtcgccagcagagccgtaaccgcaacggccgtcgtgacgaagagcgcaagccgcgcgaagaacgtgcgccgcgtgaagaacgcgccccacgtgaagagcgtgcgccccgcgaagcccgcgaagaaaccccgaccgtagaacgcgcaccgcgtgaagagcgcgcaccgcgtactccacgtgccccgcgtgaagaccgcaagccacgtggcgagcgcgaagagcgtgtgcgcgaactgcgcgagccgctggacgctgcgccagccgttgccggtgcagctgttgttgccgaagaacgcccggctcgccagccgcgcgaagaacgtgcgccacgtgaagaacgccagcctcgcgctccgcgtgaagagcgtcaaccacgtgccgaacaggccgccgccgccagcgaagaagaagtgttgaccggcgaagagcaattgcaggaagacggtcaggaaggcgccgaaggcgatcgtccacgccgccgctcccgtggccagcgtcgtcgcagcaaccgtcgtgagcgtcagcgtgatgccaacggcaacgtgatcgaaggctcggaagagaccggcgaaaacgcagaagccgctaccggcgaaccgactggcgccgaactggctgccggcctggccgttaccgctgccgttgccagctcggtcatcagcgctccggctgaagcccaggctcacgagcaggctgagcgcgctaccgcgactgttgaagaagccgtcgttgtagaagcacctgctgccgagaccccggtggttgaagcgccggtcgttgaagcacctgctgccgaaaccccagccgtagaagcgcctgttgttgaagcgactaccccgatcgaagcaccggttattcctgaagtggaagttgctccggttcaagaaaccctaccagaagttgaagcggtggctgagcaagcaccggtagtcgagcctcaaccagtggttgaagcagtggttgatgctgctccagaagttcgtgaagttcgtgaagaacagaccgccttccaatggactgccgagcctgccgctccggttgaagcgccagcacctgccccagcggtagaagaagcgccggcaccggttgccgaagttgtggttgccgagccagccccagtggttgagcccgctccggcctttgaacctgcgccggtggtagaagtgccggtggttgccgaagtggctgcacccgtggttgaagccgctccggtcagcgccctgaccgaaaacggccgtgcgccgaatgatccacgtgaagtgcgtcgtcgccgcaaggaagctgaagccgctgctgctgccgcagccgcagcacaggaagcagagcacgagagcaaacctctcgtctgattcccgcagcaactaaaaagccccgcctgagtgatcaggcggggcttttttatgttcgttcgattagaggtaatgcaacaacgcaggcacgtccacatcccataacacgccagggtcatctacaggcacctcacgcacagtcgcctgggcaaacaacggcttggctccacgatcaccggtcaaagccatcaactcaggcccaaatgcccggccaaacgccacaggatgcccgtaatgcccgtcctgcaccggcacactgatgccaccctcctccaaccccgcaatcactcgctcaatgctcgatgactgaataaacggcatatcccccagcaccaccagccaaccattcgccgaagcactggcggcaaccgcagcggcaatactgtcgcccatgccggccgagcacagcagcaataccttgcagccgtaggcctctgccaggcaaatcacttcagaccgatccggtgaagtcaccacccagcgatcaaccacgacactcggtagattcttcagtacctgctcgatcaccggccgaactacaccacccaggcccacacaatccgccagcaacttatcctggtcagcccctgccaccgcgcgaaaccggctgccctgtcccgccgccagcacaatcgcggtgatgctcactcaaccaccaccggcagcggtttcttctgcatcggtgccacgccgttcttgatcgcgacaatttccgccatcaacgacaatgcgatttccgccggcgtgtgactgccgatatgcaaaccgatcggcccatgcaggcgcgcaatcgcttgcgtcgataaccccagcgccgccaggttctcccggcgcttctggctgttgacacgtgaaccaagggcaccaatgtagaacgccgaggaattcagcgccgtcagcaaagccatatcatccaggcgcgggtcatgggtcaggcagacgatggccgtgcgctcgtcggtctggatattcaacactgcgtcatcaggcatgcccggcacaaagcggccgtgctgctcttcccagccgtagacgaactcatcacgcgggtcgcagatcagcacttcgaaatccagcaggcgcgccatttccgccacataccgcgacagctgcccggcgccgatcaacagcaggcgccagcgtgggccatagatggctcgcaggcgttcaccgtcgaaggtgacgacatcggtcttgctcgcgccactcaacgtcaccttgccagtggccagctccaactcccgggcgacgatctgatgatcctcgcaccgcgccaacagctcagccacccactcccactcgtccacccgctcctcggtcaggcgcaaggtgccgccgcacggcaggccaaaacgcgccgcctcatcgcgggtgacgccgtaggtcaccaactgcaccggcggcccgtcttcaggcagccggccatcctgcaggcgggcaatcaagtcgtcttcgatgcacccgcccgataccgagccgatcactaccccatcgccccgcaatgccagcatggcgcccggcgggcgcggcgcgctgccccaggtctggaccacgctgtacaacaccactcgctgtccggcacggcgccattcgagcacgctgcgcaggacattcagatccacactgtccacataacctcctgcaagcgttaaaaccgagtcattcactgtaaaacaaaagtcgccgaagtgacgcgccagaaacgcaaacgccccgaaccagtcggggcgtttgtgcgttgctgtcggcgttagttcacgccatcggcgatttacttgaccacaggtgcagggccttcggccacgcccaggtcatccagttcacgggtttccgagataccggtgccgccggacgccagctcgctttgcagcttgtcggtatccagctccttgacccatttggccacgacgatggtggcaacggcgttacctacgaggttggtcagcgcacgggcttcggacatgaagcggtcgatacccagaatcagcgccaggccggcaaccggcaggtggcctacggccgacagggtggccgccagtacgatgaagcccgaaccggtcacgccggcagcgcctttagaggacagcagcagcaccagcagcagggtgatctggtgggtgatgtccatgtgggtgtcggtcgcctgggcgatgaacacggccgccatggtcaggtagatcgaagtaccgtcgaggttgaacgagtagccagttggaatcaccaggcctactacggatttcttcgcgcccagacgctccatcttgatcagcatgcgtggcagtgcggattcggaggaggaagtacccagtacgatcaacagctcttcacggatgtagcggatcagtttgatcacgctgaaaccgtgagcgcggcagataccgcccagcactaccagcacgaacaggatgcaggtgatgtagaagcagatcatcaactggcccaactgcaccagcgaacccacaccgtaggcaccgatggtgaatgccatggcgcccagggcaccgattggcgcgagcttcatgatcatgttgatgatgttgaacatcacgtgggcgaagcgatcgatgaagtccagtaccggcttgccgtaggcacccaggcggtgcagggcgaaaccgaagatcaccgagaacatcagcacttgcaggatgtcgccgttggcgaaggcaccgacgatcgtgttcggaataacgttgaggataaagccgacgatgctctggtctttaccggcggtcacgtaggccgcgactttggaagcatccagggtcgctacgtcgatgtgcatgccggcgcccggttgcacgacgttcaccacgatcaggccgatcagcagcgcgatggtggaaacgatctcgaagtacagcagcgcgtagccgccggtcttgccgaccgatttcatgctttgcatgccagcgatgccgctgacaacggtgcagaagatgatcggggcgatgaccattttgatcagtttgataaacccgtcacccagcggcttgagggccacaccggtctgtgggtagaagtgaccgagcaaaataccgataacgattgcaacgatcacctggaagtacagggatttgtagataggctgacgagtcgtcattgcaaagttcctcaatcgtcccgtgtggcaaatatccgccattgcccacgacacttgaattgcgaaccctcctgcactggagggatttgttgtttgcgaggtctgtaggtccagcctgcgctgtaatccttgtcgcaaacaccgtgccactttgctgaaaaaccctgaaggcctttagacatcagggcttgggcttctccggccccctcccaagcctccaatcgagtggcggatttccgcccagcgccccaatcacgtcctacaatttggcggatatccgccttgtgaccctacccgggcatgactaccatccgcctctccatggacgaggccttcgcatgcgtgaacgtaccatcgccagccattacgctcgggcagccctcggcggcgcgcgcagggcgggctacgactactcgggcctgctgttgcaggcaggcatcaccccggaactgttgaccgaaccccgcgcccgcatcgcaccggaacaatttacccggctgctgcaaatgctctggctggcgttggacgatgaatacctggggtttgccgacggcccgagcaaacgcggcaccttcgccatgatgtgccacgcactcatccactgccgcaccctggaaaaggctctggaacgcggcttattgttttatagcctatttgcgcaaggcccacgctggcagctgacacgtgaaggcgacatggcccgcttgagcctggacgactcgcaactgtgggacccggatcacttcctcagcgaatgcctgctggtgatctggcatcgactcggcagttggctgatcggccaacgcatccgcctgcaccaggccaccttcagctacccgatgccggcccacgccagcgaatatgacctattgtttccctgtgcccaggtattcggcgcaccgaacagcagcctggtgtttcacagccgctacctgagcctgccgctgctgcaggacgaacgcacgctcaagcacttcctcgagcgctcccccgccgacctgttgtcccgcccggatgaaggcgacagcttgagcagccagctacgccgcttgctcagccgcgaccaaacaccctggcccgacctggaagccgtcgcccagcacctgcacatcagcccgcagaccctgcgcaggcatttgcgcgaagaaggcaccagctttcaggcactcaaggatgagttgcggcgggacatcgccatctatcatttggggcgcgcggatttgtcgttgcaggagattgccgagcagttggggttttccgaaccgtcggcgtttcatcgggcgttcaagaagtggacggggttgacgccgggggcttaccgagcaaaagagagttagagatgtagcgcctggactaacgctatcgggggcaagccccctcccacctttgaatgtgttcaaacatcaaaatgtgggagggggcttgcccccgatgaggcctgcacaccccataaagatcacaaagccgggaagtgaatcctgaaagcggcgccacccaatggcgaatcgcccagggtcaaccgcgcaccgtagctttcgatgatgtccttgaccaccgccaagccaatcccctgccccgggtgctggcgatccaggcgctcaccccgttgcagaattcgtgcacgctgatccggcggcacgccaggcccgtcatcctcaatacacagctcggtgccttccaggctttccaccaggctgatgcgcacttcgctcaagcacaggcggtaggcgttttccagcaggttgccgagcaactccaacaaggcgcccttctcgatcggcacatcgcattcttccggcaggtcgaaggacacgctgacgcgcttgtcgcggtagaccttgcccagcgtatcgcacaggctttgcagcaccggctccaggcgcacctggtggcgcaccaggccgcttttgcgcaggctggcgcgctgcaactgatagctgatctgctgactcatgcgctcgatctgcgattgcagcacccgggcctgctcgcgatcttccggacgctgggccatttcttcgctcactccctgtaaaacggcgagcggggttttcaggctgtgggccaaatcgtcgagggaatcgcggtagcgcacgcgttgctcacgctcgctgtgcagcaagcggttgagggagccggtcaggcgcagcaattcgcgggggtgctgttcggagaggctctcacgggtgccgccttcgatctggtcgagttcctggctcagccgccgcagggcttgcaggccccaggtcaggcccagccacagtaaggtcaacagcaccagcaaggctgcgccgaagcccaggtagagattttcgcgcaggccttccagggtcaactggtattcacgcaccggttgcagggccacgatactgaaggcggcgctcttgccgcccagtagcctgacctcgacgtcatacacgaagaattcctggccgttggcctcgcgaatccgcgcaaactcgttaccgcgcccgtcgtaacgcggtttgtagttgatgttttcttccttggtcgcccgcgaacgccacaccaggtggccttcgcggtcgtagatgtagccgagcaggcggctgtcagtgaggttgaagcgttcgtcgggcaactgcgccggcatcagcaggcggttgttttcgacccgcgcggcagagatcaaggtggtgacgtccgacgccaggcgttgctcgatggaatcctgcaacgccaggctgaacgccccttgcatggccggcaacaggccgagcatgaacagcacggccaaggtcgcggccgccagcatcaagcgcacgcgtagcgagcgaatcaacggcagcgctcattgaacagatagcccaggccacgcacggtgtcgatcggcttgaacccggccgggccttccagcttgcgacgcaggcggccgaccagcacctcgatgacattcggatcacgctcgtcgtcatcggggtagagctgttccatcaagcggtctttggcgaccacttgttggtgatgacgcatcaggtattcaaggatccgatattcgtaggcggtcaacgccagcggctgctcttcgagcgacgcctgcttgcggttgagatccagcagcaacggcccggcaacgatggtcgactgggtaaagccactggagcggcgcagcaaggcgttcatccgcgcctccagctcttcgaactggaacggtttgaccacgtagtcgtcggcacccgcagccaggccttcgaccttgtcctgccagttaccgcgggcggtgaggatcaggatgggaaaggtcttggcctgagtacgcagttggcggatcaggtccaggccgcccatgccgggcaggcccaggtcgatgatcgccaggtcatggttgaactggccagtctggtacagcgcctcttcggcattggccacggcctcgaccacatgcccgctgtcggtcaggcgggtaaacaggtgatggcgcagcagcgcctcatcttccaccaccagcaatttcataaggctctccaaggcaattcaactgtccgacagagggatatcatagcggccctgcagctcttgcgggcgcagttttatgccattgaactggccggtcaggtgttcataaccggcgcgatagcccgcctgcggggtgacaagccccagggactggccccagggcgtgggttggctgcccacttcttcgaagctgacacgctggatcaaggtgctggatttcttggttttttcaccgccgaatgcggcgaaggcgccgtcggatgcctggaccccagcggtggcactgagcatggttaacgccaacatcagctgtttgatcgcagtcatggtgttacctctatgcgtttggctgtatgccccagactacgcaggcgcccctgaactccccctgaacgggctctgaaccccacctgaaccacagcgggctatcctcgcgcccctcaactcggcaaaataccgcccatgaatccgctacccgcttgctgcaccccactcgacgcccattggccgctgcccgaatcgttgcccggcacggtgtttctcagcacgcgttttgacccggccctgctcacgcctggcgacttccagcgctgtgccgtgccgccaccggcgagcatccagcgctcggtggccaagcgccaggccgagttcctcgccggtcgcttgtgcgcccgtgccgccctgcaacaactcgaccacctcgactgcatccccacgatcggcgaagaccgcgcaccggtgtggcccgcgcacatcagcggctccatcacccacagcaccgggcacgccgccgcgattgtcgcgcacaaggcgcaatggcgcgggctggggatggacctggagaatgtgttgagcctggagcgggcggagcggttggccggggaaatcctgacggctgatgagctgcaacgcatggccaccttgccaagagagcagatagcgcagttggtaacgctgacgttctccgccaaggagagcctgttcaaggcgctctaccccattgtgcagaagcgtttctactttgagcatgccgagttgctggaatggtcagaggccgggcatctgcggctgcgactgctgacggacctgtccgaagagtggtgccatggcaaggaattggtggggcagtttgcggtgggtgatgggcagctgttgagtctggtcgcagtcagcgcctgatccatcaggatttatcctgatccctgggccaactcaaactgaaacacgcgccgcccaagttattgctcttgctgatcaacgcccgcccaccgtgccaatagataatccgccgcacaatcgacaaccccaggccatgcccgcccgaggcacgggtgcgactgtcgtccaggcgcagaaagggcgtgaagatgcgctcccaggcgctttccggcacgccggggccgtcgtcttccacgtcgatgcggcagcgtacctggcccacctgataactgatcaacacctggccctgggcgtggcgcatggcattgctcaccagattctgcaacgcacggtgcaggtagcgcggctcggcatcgacccaggcgtcgtcccaatgcgccgaagacaagcaaataccacgggctacatttatttgcggacgcagtggcgataattcgccgatcacctgatcgagcagcgcatcaaggtcgacccgttggaaattcagctctggcgagccttgttccaggcgcgcataagtgagcatttcatccactaggccgtcgaggtcctggatgtcactgtccatgccctccaggtatttacgccgcgcctcgacggtagtcgcgtcgccgaccatctccagaccaaaacgcaagcgtgccaccggcgtgcgcagctcgtgggacaccgcgcgcaccagttcgcgctggatcgccagcagctgttgcaaatgctcggccatgccattgaacgccgccgccagccgccccaccgaatcggcaccacgggccggcacccggacttccaggttgcccttggcgatccgcgtggcggcggcttccagaccgcgcagccgacgttcaagctggcgcaccaatagatagacgatcagcccgatcagggtcaggccgatcaaggcgatcaggatcagccattgcgccgggtaagggttcatctgatacaacgggccgatctccagcacccacggcgtaccgaccatgccggcaaacacgcggatcgaatcgccgcccttgcccagggccatcaccgtatcgccttccgatacacgacggcgctggtcttcatccatatcagcctggtcgaggggcatcaggtgcatgtcaaagccaaagcccttggcttcctttatctgcgccaggcgttgcggctgttcggccaccgggaagcgcaccagctcatcggccagcaggtagatggtcgcgcgcgccagttgttcgctgatctgctgcacttcacccgtcagcacaagcggctcttgttcgctgaccaagcgcagtacccgcgcggcatgtggcccggtctgttgcaccagcacctggccgcgttgcaggcgattgcgctggctcaagtccagttgtgcatcggccagcgggcgcaactccagcgggatccccagcaaccgctcccacaccgccagggcgcgctggcgctcgatggcactcatgggttgcaggttgtcgcccatcaaggcgaaggtgccatgggccaggcgctcgcggtactgaccgctgcgcacctcgttgagcaggtgcagggcgagtacgccgagcagcgccaccaggatcagcgccgcgcacatgccgccgtagatgcgcaggaagatcgagttcacagcggcatgtcggcggcggcttcggggacgaacaggtagcctttgctgcggatagtcttgatcaggcgcgggtggatcgggtcgtcacctatcttggggcggatgcgagaaatacgcacgtcgatggagcgatcctggccgtcgtagccgatgccgcgcagggcaatgaagatttcttcgcgggacagaatgcgcccggcattcgccaccaatagccacagcaggtcgaactcggcgctggtcagttcgatgccgtcattattcagccaggcttcgcgcagggcattgtccaccaccagggggccgaattgcaggcggcgctggttctccgcgctggcggtctcggccgactcactgcgccgcagcaaggcctggatgcgcgccagcagcaggcgcggacgcacgggcttgcacacataatcgtcggcgcccatgtccaggcccagcacctggtccatgtcgtcggtgcgcgcggtgagcatcaggatcacgccgtcatagcgctcgcgcaccttgcggcagatgctcaggccgtcttcgccgggcagcatcaggtcgaggatcaccaggtcgggctgttcggcgatgatccgcgccgctgccagggcgccatcgccctccaccgagacgcgcaggccgttgctctccaggtactcacgggtcaactcggccaatcgctggtcgtcttcgactatcaatacctgccaggcttcttgctccacgggtgacctcaatgtctgtcataaaaggcgggcatgatgtgggtcacttcttagcccgatgtgggcgattgtagccatgggccagccctcaaacacaagccgggaaatccattcggtgatcgcgtttttttgtgatagggttcgcgcccttcgaaaatgggccgcttgttttgagcccgtaacatttaatgacaaacggtgtaatccagcagcaatgcggcctacacggctgttctacctttcttacacattttacccacagcgttatccacaggttactgcgttgctaacccctcaaaaacgcattatcttgtacctcggcactacagaagaccctacatgtggggttttcacagaaatcgcccaaccacacaagtggctcgaaattcaagcgttttattgctagcgcagcatggaaccaaccgattttcagtagaccaaaccgctcacgcggatggcagctgtttcccatccccgatatggaaaacggtacgggtgttgcaggaagagcctggcactcgcaatcaaatatagaacgtggagacaaccccccatgcaaaccgacacaactcgcgagaacccgcaaggctccgtgccgcaggccgccgattcgaacctggatctgtccgccactgcacccggccaattgcgcgtgatcaagcgtaacggcactgtcgttccttacaccgatgacaaaatcaccgtcgccatcaccaaagcgtttcttgcagttgaaggcggcaccgctgctgcctcgtcgcgcatccacgacaccgttgcccgcctgaccgaacaagtcaccgcgaccttcaagcgtcgcatgccatcgggcggcaccatccacatcgaagaaatccaggaccaggtcgaactggccctgatgcgtgccggcgagcagaaagtcgcccgcgactacgtgatctaccgtgattcgcgcgccaaggaacgtgccgtacgctccccggccgaagaagccgccgtgcaagcgcatccgtcgattcgtatcaccctggccgacggcagctttgcaccgctggacctgggccgcctgaacaccatcatcaccgaggcctgcgaaggcctggaagaagtcgacggtgacctgatccagcgcgaaaccctgaagaacctgtacgacggcgtggccctgaccgacgtcaacaccgccctggtgatgaccgcccgtaccctggttgaacgcgagccgaactactcgttcgtgactgcgcgcctgctgatggacaccctgcgtgccgaaggcctgggcttcctgaaagtcgccgacagcgccactcatcatgagatggccgacctgtacgccaaagccctgccggcctacatcgccaagggtatcgaattcgaattgctgaacccggtcctggccaccttcgacctggaaaaactcggcaaggcgatcaaccacgagcgtgaccagcagtttacctacctgggcctgcagaccctgtacgaccgttacttcatccacaaggacggcatccgcttcgaactgccgcaagtgttcttcatgcgcgtggccatgggcctggcgatcgaagagaagcacaaagaagaccgtgccatcgagttctacaacctgctgtcgtccttcgactacatgtcgtcgaccccgaccctgttcaacgccggcaccctgcgtccacagctgtccagctgctacctgaccaccgtgccggacgacctgtcgggcatctaccacgcgatccacgacaacgccatgttgtccaaattcgctggcggcctgggcaacgactggaccccggtgcgcgcactgggttcgtacatcaagggcaccaacggcaagtcccagggcgttgtaccgttcctgaaagtcgtcaacgacaccgccgttgcggttaaccagggtggcaagcgcaaaggcgctgtctgtgcctacctggaaacctggcacatggacattgaagagttcatcgagctgcgcaagaacaccggtgatgaccgtcgtcgtacccacgacatgaacaccgccaactggatccctgacctgttcatgaagcgtgtcttcgatgacggcaagtggaccctgttctcgccatccgaagtgccggacctgcacgacctgaccggtaaagccttcgaagagcgctacgagtactacgaagccctcaccgagtacccaggcaaggtcaagctgttcaagaccatccaggccaaagacctgtggcgcaaaatgctgtccatgctgtttgaaaccggccacccatggctgaccttcaaagacccgtgcaacctgcgcagcccgcagcagcacgtgggcgtggtccacagctcgaacctgtgcaccgagatcaccttgaacaccaacaaggacgagatcgccgtttgcaacctgggctcgatcaacctcccgaaccacatcgtcaacggcaagctggacaccgccaagctggaacgcaccgtcaacaccgctgttcgcatgctcgataacgtcatcgacatcaactactactcggtgccacaggcgcagaattccaacttcaagcaccgtccggtgggcctgggcatcatgggcttccaggatgcgctgtacctgcagcacattccttacggttcggatgcagcggtcgagttcgccgacaagtccatggaagcggtcagctactacgcgatccaggcttcctgcgacctggccgacgagcgcggcgcctacgagacgttccagggttcgctgtggtccaagggcatcctgccgctggactcgcaacagatcctgatcgaagcccgtggccagaagtacatcgacgtcgacctgaacgaatccctggactgggcgccggtacgtgcccgtgtgcagaaaggcattcgtaactccaacatcatggccatcgcaccgaccgccaccatcgccaacatcaccggcgtatcgcagtcgatcgaaccgacctaccagaacctgtatgtgaaatcgaacctgtcgggcgagttcaccgtgatcaacccgtacctggttcgcgacctcaaggctcgcggcctgtgggactcggtcatgatcaacgacctgaagtactacgacggttccgtgcaacagatcgagcgcatcccgcaggaactcaaagagctctacgcgactgccttcgaagtggacaccaagtggatcgttgacgccgccagccgtcgtcagaagtggatcgaccaggcgcagtccctgaacctgtacatcgccggcgcttcgggcaagaagctggacgtgacctaccgcatggcgtggtaccgtggcctgaaaaccacttactacctccgtgccctggccgcgaccagcaccgagaagtcaaccatcaacaccggtaagctgaacgcggtttccagcggcaaccatggtgatgactcggtgcttgcagccccagccggcccggcgccagtgccaaaggcctgcgcgattgacgagccggattgcgaagcttgtcagtaagctgaggcactttcaggtttaactacctgaaacagcgagccccctgtaagcccaggatttcaaccgggcttacagggggcttttgattacaggagatccctctttttacttaggcatacccccgcttgaagctccaggcaatcaaattgggatcagtgcgtgcattgccgaacttcgtaccccatcgatcctcattaccgcccattaccgccaccgaatgtgttgaattatccaaggtgccgggccggcccctggccaactcagaaggactgactctctctacaagatttttataccccaaccgatcgaaagtctccttagcccactccccattattgatgctatcaatggcttcgctgaagcttctcccggaaataccgtcgttacgctggttcattgcctgaacgttattcacggccaacatgagattcataaacccaagcaacttgggatcctgtccctgtagttgagcccttgctgctgtctcacggtactgcgactgcgtaacccggacatgattgccgtctttgagcgttacatcgtaattacctgctgagtcccgcttgacgtccttaaacacacccgctggcccatactgcgcaatcatggccttacaagccgaaatagcgccgcaattacctgcttgtccctgataggcaccggaaaagagatttttcggcatttcaccaggtttgtagctacccggctcgaaattggtttgatgggttcccgccgtgaccggcaagttacccaccgcctctcctaaccctaaccccccacggtcaacgccaccgccttcgtaacgaccgcgtccaccaccgccaccacccgaaccaccaacaccacctcctatcccgcggcttgactgcgattcaacatcagtcgacacgccatctggaaacagctcaggaaacagtgccttcataaactcaagccaactgttaggcgcgtccttttttaactgctcgataatctccttgaacttgtcctcccccaacttcttgcgcaaatcattcagcttgtcacgcaagtcttgaacagtctggttcttggaggttttctgagcgtcttccagttccttgagtagttttaagacggcatccttatcagcagctgtgctgtctttggtttcctcagtgcgcggtacacccgtccctccttgccaatacaccaagcccctatcgcccgacgtcaataagtcccacataaccttcgcctctaacaaaactattggctcaatgggtggagcaagaggtgtaggtagttccagcaaatcgtgtgatctcttgagcgggtagccctgccaaaaaatcaatgcaaaaaaaacccctcagtcgaggggcttctttcttcaagggatcaggccaacagcgtcacgtcatctgaatgatggtctgcatgatggtgctctgggtggagatggtcttggcgttcgcctggtagttgctctgggccttgatcaggtccaccagctcgttggtcaggttgacgttggagttctccagggagttggccacgatcgaccccagggtaccggcttgcggggtgtcgtaacccggctggcccgacgcgaaggtttctttccaggtggtgccaccggctggctgcaggccctgctcgttgttgaagctggccagggagatctggccgatggccttgctctgctggttgctgaacgtggcgaacagtacgccgctaccgtcgattttcagcccggtgatctggccggtggcgtagccatcggtgaccggtgggttgcggtaggtggccgagttgtactgggtgatgttggccatgttgacggcgatacctgttgggttcgcatccgcaccgttggccttccacacaccattggtcacggtgccaggaacccaaccggtaatggtcagggtcttgtcggagacaccaccggtgaccacactggtcagcttgccggcgccgtcaaaggtcaaggtcgatggcacaggtggggtcgatggggtgccggttggcgccgaaccattagggttgcgaccatcgatcagggtataggcattccacttattgccgtcggttttcaccaggtactgcaccatcgggtgcgcgttgccctgggagtcgtacaaggtggtgctgtactgggtggtaaaggtgctggtgtcgttcgggttgaacggcttggccacctggtcgatcaccggctccgaggagttcaggttactggtggaatccactttggtggaggccttgggcggcaggttcgacaggttcagttgcaggtcggtcaggccgcccttgatgatcttgccatcggcatctgccgcgtagccttgcaggcgcgaagtgccggtgttgttggtgatgtagccgtctttgtcggcacggaaggcaccgctgcgggtgtactccagcgaaccgtcgctgcccttctgcacgaagaagccgccaccctggatcgccatgtccaggatcccgccgctgccgttgacgtcaccttgggtgaactgctgcgacacggccgcaaggttcacaccgttgccgatgctgttctggccggtgcccagcttggacgcggcgtagatgtcggcgaattccgcacgggacgacttgaagccagtggtcgcgacgttggcgatgttgttgccggtcacgtccagttgtttgttggccgcatagaggccgctaaggccgatgttaaaagacatgtttctctccctctgccgtatttagccggctctatgtaccgatagtctgaatttgcgacagcttgacgctgcccatgccgccagccaggttcagcagcatttcgccgccggtcttgctcagggtcacgctcgttaccgtcgcgggcagcgaagtggccagggcaacggagtcgcccttgtcgttcttggtggtggcgttgaaggtgtaggtacccgccggggcaacctcgcccttgtcgttcttgccatcccagatgaagttctgggtgccggcgctctgggcccccatgtcgatggtgcgcaccacgttgccgtctttgtcggtgatcttgacggagacgttgcccaccgccgaggtcaccgccaccgaaccggtcatgctcttgctcgtatcaaccatggccttgtcggtctggatgatgatcgagcgcccgaccagcgacgaggcctgcaacgcctgcgacgaactgaagttggtggagatcgcattcaccgagtcgttcagggtgttgatgccttccaggctgctgaactgcgccagttgcgccacgaacgcgccgttgtcttgcggcgacagcgggttctggtttttcagctgggtcaccagcagttgcaggaacgcatccttgcccaacgcctgcttgcccgtcgccttattggcggcgtcgctgacgctgctgttgtcctgggcgttcttgaccttggagttgaacaggtcctggaccggcgtgttgtttgacgtatcaacgatggccattgtttggcgccccttatcactgacccagggtcaggaccttctgcatcatggttttggcggtgttcatcatttccgcgttggtctggaacgagcggctggcggaaatcatgtcagccatttcctcgaccacattgacgttggggtagtagacataacccttttcgttcgcagcgggatggttgggttcgtagcgcgcttcaaggttgctctggtcttcgaccacaccgagtacctgcacgccggagccggcggccccctggtcctggaacagcgaatcgctgccgccgttctggcctgcctggaacatggtggcgaacaccgggtgacgggcacggtaggtctggtcaatgctcgaagacacggtctcggcgttggcgatgttactggcgacggtgttcaagcgcgtggtctgcgcgctcatgccactgccggcaatattgaaaacactggacagggacatggcttactctccacgcagggctgacatcagccctttgaatttgctgttgagcagggtaaagctggcctggaagttcaccgagttctcggcgtaggccgattgctccagttgggcgtcgacggtgttctggtcgatcgacggttgcatcggcgtgcgatacagcaacgactcgtcaccattgctcaggccttgcgcttcgatatgacggctgttggtcatgttcaaggcgaaggtgccgttcttggtcttgtcctgctgtgcggcgagcacggcggagaagtccaggtcccgagccttgtagttcggggtgtcggcgttggcaatgttgttggccaggacttcggcacgctgggcgcggaagcccagggcttgttcgtggataccgagcgctttatcgaagctgatgctcatggcggaaaccttcaagggctgacctgcttttcgttaacagggttatagcaaggtgcatgccaatctggcgcaagcccgtatatcaagggttttggtaaggggttgccggcggcaatgccggaaaagcggcaagcggtttccgcgtcgcgccagtaaagcggcaatgagggttgccgctttattgcggtttgccgcaaaccaaatgtgggagggggcttgctcccgatggcnnnnnnnnnnnnnnnnnnnnnnnnnnnnnnnnnnngccatcgggagcaagccccctcccacattttttaccgcacagccttatttagcctggtagatgatccccgggctgcactgcaccatctggaaatggtccggcagaccgttcagcgcctcagaagcgccaaggaacagataaccaccgcgcttgagcgtgccgtggatgcgcaacaggatgtctttcttcacttcggccgagaagtagatcagcacgttgcggcagaacaccatgtcgaacttgcccaggctggcgtagctgtcgagcaggttgaaggagcggaattccacgcggttcttgatcggcgccttgaccgcccagcgtcctgcccctttcgggtcgaagtaacgctgcaggcgctcctgggacagaccacgccccagggccaggctgtcgtactcaccggtcttgcagttggtgagcatggtgccggacagatcggtggccacaatttgcgcccccgccttcaactggcccatgttggtccgctcgaactcatcgatggacatcgaaatcgagtacggttcctgccccgaggagcaggccgccgaccagatgcgcaggcgctggcccgggctggccttgatggcctccggcagcactttgctcttgagcacttcaaacgggtaggtgtcgcgaaaccacagggtttcgttggtggtcatggcatcgaccaccatttccttgagcccgctgcgcggctggccctggatgcgctgcaccaactcacccaacgacttgatgccctgctgctccatcagtttgttgagacggctggataccaggtactgcttgttttcaccgagcaatatgccacaggctttttccaggaagacccggaactgttcaaaatccaaattacctgtagacactgataccgcctctaaaatcgtatgaccgccaagggaaacaccttagctgtgatctgctgccttgatccggtcgacaacccgggatgccaggtcatcaggacggaatttggccaaaaagtcatcggcaccgaccttcttgaccatcgcctggttgaatacacccgacaacgaagtatgcaggatgatatgcaatttttgcatgcgtggatcgttgcggatctcggccgtgagggtatagccgtccatttccggcatctcgatgtcggaaatcatcatcaagaattcttcttccggcttcttgccgtcatccaccagcttgcgcaggtagtccagcgcctggcgcccatcattgagggcgaccacttcaacgccgacggtttgcaggcaccgggtcacctgcttgcgcgccacggacgagtcgtccaccgtgagcacgcgcagtgagactgccttgtgcgcggtttcggcgtccaccacacccaccgagatcgactcggaggtaggtgccacttcggcgagaattttctcgacgtcgatgatttccaccaactggttgtcgacccgcgtcaccgccgtaaggtaatgatcgcgccccgtgcccttgggcggcggatggatctcttcccagttcatgttgacgatgcgctccaccgaacgcaccaggaaaccctgggtcttggtgttgtactcggtaatgatcacgaacgggctttcgcggtcctgcaaaccggcggaaccggtggccagggccagatcaagaatcgggatcgtcgcgccacgaatgttggcaacgccacacactaccgggctggacttgggcatgatcgtcagcttggggcattgcagcacttcccgcaccttgaacacgttgatgccatacagctgcttgccatccaggcgaaaaagcaacaactccaggcgattctgccccaccagctgtgtgcgctggtttactgaatccattactcctgccatgccttgactcccacgctaaaaccttcggccatacctataagggcagtgacgcgcacccaacactaaacggcacgagctttgctatttattggtcatggatattaaaacgacagtttcccgacgcctccacctgacacggtattgcagactgctctgcgcaccgctggcactgcttgccttgggcctgggcgccacggcccgcgcagataacgtcaccttgcctgatctacttatcggcgtcacccagggctttcttgagttcactgtagaagattatctggcgaccacccagacgccggggcgttatgaaatccaggtcaaccagttggacccgcgcctgcgcatgcccatgtgcgacaaggaattgacagccaccctggaaagccccgcccaacccatcggtcgcgtaacggtgaaggtgcgctgcgacggcgcctcgccctggacggtgttcgtgcccgcccaggtcaaattgttccgcgatgtggtggtggttgcccgcccacttaaacgcacgggcattatcggttttgaggacgtggtgctgcgcgaacgcgacatcagcatgatcagccagggctacttgacctccctcgaccaggccgtcgggcagaaactgacccgaccagtggtcaccgatcaggtcatcaccctggtgcacctggagcaggccgaggtgattcgcaaaggtgaccaggtagtgatttccgccagcagtggcgcgctgcaggtcaaaatgccgggggaagccttgtccaacggcggcatgagcgaacagatccgcgtgaagaatctcaactccaaccgtgtgatcaaggcgcgagtcacggcccccggccaagtggaggtggctttatagaccactggtatcagacgccagcttttcctacactgtcggttggatgccggccggtgcagtttattgtcattcgagcctaaagtttgtccggatatggccgaaaacatggcaagcgtccaaatacccagaggttttttgatcatggtcatcgatttcagccgtttaaatagcaccccgacaacgtcggctcctacgcgcactgtcggcaccaaggacagcgtagaagccaaggctcagccactgcccgccaaggcagaacaggccagcgccagccagagcggggaatccgtacacctgagcaatgaggctcaacagttgcagaaggtcactgactcgctgcgcgatcaaccggtggtcaataaagcccgtgtggccgaattgaaacaggcaatcgccgatggcagctataaagtcgacagcaaccgtgtagccagcaagctgcttaatttcgaagccgagcgctaggcaaaggcctgcgccgggcttttggacgcttaaaccccaaggccagccatgcatcacgacgaaaccctgcttcaactgatcattgatgatctagcaccgacgcaattgctgctcgagctgctcagggaagaatccctggccctttacggccgggacatgcccctgctggaagaaattctggcgcgcaagcaatcgctgattgtcctgctggaacagcacggcaaaaaacgcagcgagatcctcgtcagcctgggcctgcccgccgaccatgatggcctcgcgcagctggccagccactcctcggtcggcgatcaactactggcccagagcaaagaactcaacctattgctcacccagtgccaggaagccaaccaactcaacggtcagtcgatccagcttcagcaagccacgaccgccaaccagttgcgtatacttcacggcggagagcctccagcgctttacaacgctcagggttccacctcgcgcctggtcaagccaagcacccgcagccaagcctgacgccggtttacagcgcggcctatccaaggcgcgccacatactggcagaatgcccgctcttgcgtgtagtcgtattttgtctggagatggaagaaccgtgttcaacgcccttaatgcggaagatgccccgcagccacccaaggtcctcaccacgcctctggaaatcgccagtaccttgcgcatgctgcaagatagccatgacccgctgatcattaccttccacgaacgcagccagcgcttccagagctacctggtggacgtcagccgggacaacggcaccctggccctggatgaaatgatcccccgcgacggtgaacgctacctcgaaaatggcgaacccttccgtatcgaaggtttccacgacggcgtacgcgttgcctgggaaagcaacggcaacctgagcatcagcgagaaggacggccaccgcatctacaccggcagcctgcccgacgaagtggtctaccaccagcgtcgcaatgcctttcgcgctgccctgaagctggcgcaactggtgaacatcgaattgggtggcgagaagctcaaggccccgatcagcggcaagctgctggatatttccgccacaggttgcaaattgcgctttgagggagacatctccgagcgtctgcagttaggccaggtctacgaccgctttatcgccgccctgcccttcggcagcatgaccacctcggttgaactgcgttacctgcactttgaagagaagatcaacaccacgtttgccggcgtgcgcttccacaacatgagtggtctggtgcagcgtcaggtcgagcgctttgtctaccagttacaacgcgaagcacgacgtttcgataaagacgacgatttttaaactcaaagatcgcggcaaaaaaacgggcagaccctgatgggatctgcccgtttttgtattcaggggcgcgccctgctcaagtcatgaggatgctcgtccgggcccggcggctcaggcggcccctcaaagagcggctcgtcgaccgatgtgaccgtttccggatcgggttccggcgcggcggtttgcatttgctcctgcaccaccgcctcgtccacccgtggatcgaggcaggctaccaacggcgagctggacatgctgtcgggcattgccacgtggtgcagcggcgcgtcatccacctgatgcaggttggtcacggctttcggccgaatccgccacaccaggatcagcgcacacaggctgaaaaacgcatacagcatgtgactgccaaacaccttcatcaccacaccggccagcaacggcccgatactcgcaccgacaccgtaggtcaccagcagcatggcggtgagcgagacacggcggtcgccttccacatgatcattggagaacgccaccgccagcgggtacaaacagaactgcaccagagaacacacgaagcccgccacgaacagtacttccagcggcaccttggtcagtaatgccagcggcagcgccgccactgccaggcacagggcaaagcaacgaatcagcagcgcgcgatcatagcggtccgacaaccagcccaacggccactgcaccagcaggccggcaaaaatacaactgcccatgaacagacccacctgttcggtagacagcccttgctgggaggcatagagcggcgccaggccatagaacgagcccacgatcacccctgcccccagcaccgtactcaacgactgcgggacgcgcttgataaagaagcgtggctccatcggcgccggatgcaggggcgccgggtgaatacggcgagtcattgccaccggcaccaggcacagcgcaaagcacagtgcgaccagcatcagcaattcgaggccgagctgagggtgcatgaccaggatcaactggccgagcaccagccccaggtaggacgcgatcatataaccgctgaacaccacgccgcgctgcttggcgtcggcctgttcattgagccagctctcgatgaccatgtactggcacatcatccccaggcccacgatcatccgcagcacaatccaggccggcagccagtcgatcagaccatgccccagcaccgccgcgccgacaatgccagcgcaggttgcataagcacgaatatgcccgacccgggcgatcaggcggtgcccgatcttgccgcccagcaccaggccaaaatagttggccgccatcagcgcaccgacccacaggctatccacatggtcggccgccaggcgcaaggccaggtaggtactgagcaggccggagccaatcagcatcatcaaggaggcgaaataaagggctcgaaaagatttccagatctggcgcatcggcgttccgagcggctccttgcagtgagagacaggcctatcggcatgatagtccggggtgaccgggtccggacaggcaacttgcgctgtttccggggattattttgcttaaaggctcagacgctgcccgaccgcttgtgaggtacaccgattgtgaaaaatgcacgcacacgtgctgtgaacgctgaacaccggcaaggttcgacccgtctttgaaaggcgcccacaaaaaagccctgccagaacagtctgtgcagggctttgaatctggtgtcccagggccggttcgaacggccaaccttccccttaggagggggatgctctatccaattgagctactgggacaaatgacagccgctacactgggacgcggcgacagacggcgtgcatgttaacggccagggtaggttttgtcatgtcgtccgtaggctttttgagtgtaggccgatacttgcctgattgatcgtgtttcaaccccggcgacgcgggcgcacgggctgtatcgtgcaaaatgcactccctcaaaatgccatcattgcaaattgcaacctaaaagccattaaaaccatcggtaagtatctgattttattgaattaatagattggcacgacacctgcaatacttctcctacaaccccaataagcctcggcgttaaacggagaacataatcatgaacagtgcccttctgttagccctgaacaccgtcgccctggccgcgttggtcatgtttcattttcaatccaccggtagcaacgaccctgcgcagatcagccaggccatcccccaccatttgcaacaacgcccgcaactggcagtgatgactccgaatgcgcaatcgccggtacgcctgacccaagacacccaagcggcacctgctactgaacactgggtattctgaggaagccgctgatgaataaatatgcctggctgttcctgtgcctgaccgttgccacagcggttctgggtttgggtgcggaatctcaagacggcacaaccaccgctttcattgccagcggtgtattcgccagcctcttattgctgacgctcatcgtcggtcgtcgcatcaaattcgaccctgtcctgcgctaatcccctctgcgcccgaccttatgtcgcctgaccctcgcatatcggcaaattgccactagtcttaaagctaagggcaaagggccactttgctataggatgtgcggcctgaaaccctgtagtggcccgggcttgcgggaagttccctcgcggattcacgcggtgaaaaattttccaaccagtccgcaaaaatgcaaatgagtgctggcataaagcctttaggcagttcaatatttgtcacagaattgacgccaaggaactgtcaaatctgaggcatgatgcggcctctttgcaattcaggttgaactttggtcgtgagccttgtcttaacactcatcttgcggccaattccaaaaaccgctcccctgaactaaccggttaaatatatgcgcccattgaaacaggcaatttattccagccgtacggctgacaagttcgtcgtacgtctgccagacggaatgcgggaacgcattgccgaggtggctcgcaatcatcaccgcagcatgaactccgaaatcatcgctcgcctggaacaaagcctcattcaggaaggtgcgctgggcgacgagttgagcatgcgcctggacagcccagagctgtcgttgcacgaacgcgaactgctgcagcgttttcgtcagctctcccaccgccagcaaaatgctctcgtctcgcttatcgcgcacgacgttgaggcggccgcagaagccaattgatctgcaactgaaagccgaagccagccatgtgctggcttttttttgcctgggatttgggaagagaatgcaaggcgggagcagatacgctcccgccggatggaatcaaagtagaaagatcgtcgccagacccaggaagatgaagaagccaccactgtcggtcatggccgtgatcatcacactggcccccatggcagggtcacgcccaagacgagccagggtcatcgggatcaatacgcccatcagcgccgccagcagcaggttgagggtcatcgcagccgtcatcaccacccccagcgaccaactgccatacagcaagtaagccaccacaccgatcaccccaccccacacaagaccgttgatgaggccaaccgccagctccttacgcagcaaacgcgatgaattggcggtactcacctgatccagcgccatggcgcgcacgatcatggtaatcgtctggttacccgagtttccgccgatcccggccacaatcggcatcagtgctgcaagcgccaccaacttctcgatcgacccttcgaacaagccaataacccgcgaagcgataaaggctgtgatcaggttgatggccaaccacgcccaacggttatgcagcgagcgccaaaccgaggcaaagatatcttcctcttcacgcagacccgccatgttgaggacttcggtctcgctttcttcacgaatcaagtcgacgatttcatcgatggtcagacgaccaatcagtttgccgttcttgtcgacaaccggcgccgagatcaggtcgtaacgctcgaatgcctgggccgcgtcgtaagcgtcctcgtccggatgaaagctcacggtgtcgctggccatcaggtcggcaactttcttctccggatcattgaccagcaggcgcttgatcggcagcacgcctttgagaatgccttcgtaatccaccacgaacaatttgtcggtgtgacctggcagctctttgagtcggcgcaggtaacgcagcaccacttccaggctgacgtcttcacggatggtgaccatctcgaagtccatcagggcgccgacctggtcctcgtcataggacagcgcggagcgcacacgctcacgctgctgagtatccaacgcttccatgagctcatggacaacatcacgaggcagctcaggggccaggtcggccagttcgtcggcgtccatctccttggctgcagccaggagttcgtgatcgtccatgtcggcgatcagggtttcacgaaccgagtcggacacttcgaggaggatgtcgccgtcgcggtcagccttgaccaactgccatagggtcagtcgatcatccagcggcaaggcttcgagaatataggcgacgtcggcggagtgcaggtcgtcaagcttgcgctgcagctcgacgaggttttgccggtgaaccaggttttcaaccaggttgttattcgggccatcctggcggtgcgtaaggtcttcgaccacacgctggcgctgcagcagctcaatgacttgagccaggcgatcctgcaggctttcttgtgttttctttacttctacttcggtcataggcgaactccactcccagcagcggggcacgccggaaggatcaatcagtcaattcatgattggtaaaacggggtactgagtaactactgggtaagtccatggaggtattccacaagccccggcggggctgacgggcgcaatgatacaccgcccggccactttaaacgtcaaaaaactggaaagaacaagcgcttgcgagccaaagctgagcaacggccgcatctatgaactgcgacgacgcagcggatgaggaaaacacatgaaggcgagagaaaaagaacaaatcccacacaaaccccagacggcaaaaagcccgcactaggcgggctttttgtttgtatggtgcactcgacaggattcgaacctgtgaccgctcggttcgtagccgagtactctatccagctgagctacgagtgcagattgtgtttttagaccagatcacaactggttgtaaccgaatcacctgcattgctgcaactgactcttaaatggtgcactcgacaggattcgaacctgtgaccgctcggttcgtagccgagtactctatccagctgagctacgagtgcatttgttgccgcgcattataggccgttcaatctctatgtaaagctattttttcgagtaatttcaacaacttaccgaaaaaaccagattgcaacgtactaagcaaataatggcggagaacgggggattcgaacccccgacacccttttgaggtgtactcccttagcaggggagcgccttcggccactcggccagctctccgcaacacggggcgtatattaaccacgttcatccccgtttgcaaacataaaaaacgataaaaattaaaggcttggttcttcgtccttctctttcttgatccgcaggtagatttcctcgcggtgcaccgctacctctttcggagcgttaaccccgatacgcacttgattgcctttgacgccgagcacggtcacggtgatttcgccatcaccgataatcaggctttctgcgcaacgacgagtcagaatcagcatacctttctcctcacgcatttcagttcaggaacaacagtctgcaaaaaaaaggccttcgacctacaacccaaaggccatagccctaccgcctaagtattgtcgagcgcgcgcaaaagaacatgcgccctacaaaaaaaggaaaggcgcggtaaaccgcgccttccaggcactgcgtcactcgccctgtcgggccggagcgtccagctcaaaagcggtatgcagagcgcgtacagccagctccaggtacttctcttcgatcaccaccgagactttgatttccgaggtggaaatcatctggatgttgatgctttccttggccagggcctcgaacatgcggctggcaacgccagcatgggaacgcatgcccacgcccacgatcgacaccttggcaatcttggtatcgccaaccacctcgcgggcgccgatttccttggcagtgttctgcaggatccgctcggccgcatcgtactcgttgcggtgcacagtgaaggtgaaatcggtggtgttatcgtgcgaaacgttctgcacgatcatgtcgacttcgatgttcgcaccgctgataggacccaggatcttgaacgccacgcccggggtatccggcacgccacggatagtcagcttggcttcatcacggttgaaagcgataccggaaatgatcggctgttccatggattcctcttcatcaatagtaatgagggtgcccggaccctctttgaagctgtgcaatacgcgcagcggaacgttgtacttgccggcgaattccaccgcacggatctgcaacaccttggaaccgaggctggccatttccagcatctcttcaaaggtgatcttgtccaggcgctgggccacggacaccacacgcgggtcggtggtgtagacgccatccacatcggtgtagatctggcattcatcagccttgagggccgctgccagcgccacgccggtggtgtccgaaccgccacgcccgagggtggtgatgttgccctgctcgtccacaccctggaagcctgctacaactaccacgcgcccggctttcaggtccgtacggattttctgatcgtcaatctgcaggatacgcgccttggtatgcgcgctatcggtgaggatgcgcacctggctgccagtgtaggacaccgccggcacaccgcgtttattcaacgccatggccagcaacgcgatagtcacctgctcgccggtggacacgatcacatccagctcacgcggcagcggctgttgatcaccactgattgccttggccagatcgatcaggcgattggtctcgccgctcatggccgacagcaccaccaccaggtcgtcgccggcatcgcggaacttcttaaccttgtcggccacctgctcgattctttcgacagagccgaccgaggtgcctccaaatttctgtacgatcaaagccatttctaagccgcctcagcccgtaaaggggcgcctaatatccaatcaaccagcaccacaccggcccgtgactagaccacgggccggttaacagtgccttaaatacctgcctcgacaaacggcacggtcagggccagggccgcgtccaggctgccggcgtctacaccaccgccttgcgccatgtccggacgaccaccacccttcccgcccactgccgcggcggcttgcttcatcaaatcaccggctttgagttggccagtcaggtccttggtcacacctgcaaccagcacgaccttatcctcatggacaccgccgagcaggatcactgcgcggccgagcttgttcttcaactgatcgaccaaggccaacagcgccttgccgtcctggccgtccaggcgtgcagccaggactttgacgtccttgacgtccaccgccgaagccgacaggtcgtcgccggccgcactggccgccttggcctgcaactgctccagctgtttctccagggcgcggttgcgctccagcacagcggacagcttgtcgatcagattgtcgcggctgcccttgaccaggctggccgcttccttgagttgttcttccgccgcattcaggtaggccagggccgcagcgccggtcaccgcttcgatacgacgcacaccggaggccacgccgccttcgctgatgattttcagcagggcgatgtcgccggtacggttggcgtggataccgccacacagctccaccgagaagtcaccgcccatgctcagtacacgcacgctgtcgccgtacttctcgccgaacagcgccatggcgcccttggccttggcggtctcgatatcggtttcttcggtttctaccgcggtgttcttgcgaatctcggcgttgacgatgtcttccagggccttgatctgctcaggcttgatcgcttcaaagtggctgaagtcgaaacgcaggcgctggctgtctaccaaagaacccttctgctgcacgtgctcacccagaacctggcgcagcgcggcgtgcagcaagtgcgtggccgagtggttcagcgaagtggcatgacgcacatcagcgtccacctgggcatcgaccggcgcacccacggtcaggctgcccgaagccaacacaccgtggtgcaggaacgcaccgccggtcttggtggtgtcacgcacatcaaaacgaccggaagccgccttgaggaaaccgcagtcgccaatctggccaccggactcggcgtagaacggggtctggtccagaaccacaacaccgtcatcgccttcattcagtacatcaaccgactggccgtccttatacagggcgaccactttggccgagccgctggtggccttgtaaccggtgaattcagtggctacgtcaaccttgaccaggctgttgtagtccatgccgaacgagctggccgaacgtgcacgcacgcgctgggcttccatctcgcgctcgaaaccttcctcgtcgagggtcaggttgcgctcacgggcgatgtcgccagtcaggtccatcgggaaaccgtaggtatcgtagagcttgaacaccacgtcacccggcaccacggagccttgcaggttggcgaggtcttgctcgaggatcttcaggccctgctcaagggtcttggcgaactgctcttcttcagctttgagcacgcgctcgatgtgcgcctggttctgcttgagttccgggaaggcttcgcccatctcggccaccagggccgcgacgatctgatagaagaaactgccgttggcacccagcttgttaccgtgacggcaagcacgacggatgatgcgacgcagcacgtagccacggccttcgttggacggcagcacaccgtcggcaatcaggaagccacaggaacggatgtggtcggccacaaccttgagggaagcctggtcttcattggtgcaaccaatggccttggccgcagcggccagcaggctctggaacaggtcgatctcgtagttggagtgcacgtgctgcatcaccgcactgatccgctccaggcccatgccggtgtccaccgacggcgctggcaacggatgcaacacgccatcggcggtgcggttgaactgcatgaacacgttgttccagatctcgatgtaacggtcgccgtcttcttctggcgagcccggtgggccgccccagatgtcagcgccgtggtcgtagaagatctcggtgcaagggccgcacggaccggtatcgcccatggtccagaagttgtcggaggcgtacggtgcgcctttgttgtcgccgatgcgcaccatgcgctcagccggcacgccgacttccttggtccagatgtcatacgcttcgtcatcgctggcgtagacggtgacccagagtttttccttcggcagtttcagcacgccagtcaggaaggtccaggcgaagttgatcgcgtcttgcttgaaataatcgccaaagctgaagttgccgagcatttcgaaaaaagtgtggtgacgggcggtatagcctacgttttccaggtcgttgtgcttgccaccggcgcgtacgcatttctggctgctgactgcgcgggtgtacgcgcgcttttcctggcccaggaagcagtccttgaactggttcatccccgcgttagtgaacagcagggtagggtcattgcctgggatcaaggagctggaggagacacgggtgtgaccttgctcttcgaagaagcgaaggaaggcttcacggatttctgcgcttttcattaggttcttccacggaggctgcggccaaaggccagtgcgcaacatcatcagacgaagcgacggcaaagggccgcattatatcggccctttgccggtggtacagcgtgtttatgcgatagagaggctcaattagacggtctgcacagtcatttgcgcgaaaagtcgacgaatgtcgcgagcacttgctcgacctgcgcccggctcacatccaaatgagtgaccatgcgcaggcgcggtgcggcgctcagcttgatcccgcgttcggcggcaaacgccttcaaagcctgggcctgatcaccgatctgcacatagaccatgttggtctgcaccggctccacctcataacccgccttgcgcaactccccccccagccattgggcattggcgtggtcgtcggccaggcgctgcacctggtgatccagggcatacaaccctgcagcagccagggaaccggcctggcgcatgccgccaccgaccatcttgcgcaggcgccgggccttggcgatcagcgccgtggaaccgcacaacaccgagccgacaggcgcaccgaggcctttggacaggcacaccgacactgaatcgaagtgctgcgcgatctcccgtgcatccacccccagctttaccgctgcgttgtagagcctggcaccatccagatgcagggccaggccatgctcccgggtaaacgcgcgggctttggccaggtactccagcggcagcaccttgccctgcatggtgttttccaacgccaacagacgggtacgggcgaagtggaaatcgtctggcttgatggctgccagcacctggtccaggtccagtgagccatccgcctgcacttccagcggctgcggctggatcgagccgagcactgcggcaccaccaccctcgtatttgtaggtatgggcctgctggccgacgatgtactcctcgccgcgctcacagtgggccatcaacgccagcaggttgctcatggtgccggtgggcacgaacaacgccgcggcaaagcccaggcgcttggccagttcggcctccagccggttgacgctggggtcttcgccatacacgtcatcaccgctggcggcagtggccatcgcgtcgagcatgccgggggtgggttgggtcacggtgtcgctgcgcaggtcgatcacagacatgaaacaagcctctcgagggttcagtaagtgccttttgtgagtgattactgcgggcaacgccacggaatatcaagccccaactgcattcaatcgaataccaaccaaacaaaccgatatagcttatcgataccgcggtcgtgcagttttcgaaaaaccgtgttaaaaactctccgccgccagggttctggcggcaacgttctcagggcggggtgcaattccccaccggcggtaattacacgcaatgtgtatagcccgcgagcgcttggcgcctcgaactgctcacgtaggacggcgacaaggtcagcagacccggtgtgatcccggggccgacggtcatagtccggatgaagagagaacgggattggcacctgagggccgcgcacgatgtgtgctcgcgtacccttaaatcccattcgattcataacgccctgtttttttcttaaacaggagtcagaacatgcaacccaccgcaatcgacagcaaagccaagcaccaccacggcgaacgtatcgcgtttatccaggcttgctggcacaaggaaattgtcgaccagagccgtaaaggcttcctcgccgagatcatcgcccagggctaccaggaatcggacatcgatttcttcgaagtcggcggcgcctttgaaatgcccctgcacgccaagctgctggccaagaccggccgttacgccggtatcgtcgccgccgcgctggtagtggacggtggcatctaccgccacgaattcgtcgcccaatcggtggtcagcggcctgatgcaggtgcagctggaaaccgaagtgccggtgttctcggtgtccctgaccccgcatcacttccacgccggcagcgaacaccagaccttcttctacgagcacttcgtgcacaaaggccaggaagcagcacgcacctgcgccgacaccttgcacaaagtccgcgcgattcgccgtagcgagccacgcgcggtagcagtctaagcaacacggcaaagtacaaggtgggagggggcttgctcccgatggcagtgtgtcagtcacttaattgtcaactgacccaccgctatcgggggcaagccccctcccacatttggatcggatgaggctttgagcttcaggccaagccgacgtccgtcgtcggcacaatcaatatccccgcccgcaaaccattcttcaccttcgggttggggaagatgatgcgcgcgccctcctcctcgatcacccagcgggtcttggccacgtcttcggccagcagatagccctgggccaacggcgagaagttttccacatccgccggcaggtgcagcaggaaggcgtcgctgtgcttgatgacttcacgggagacggcaaacagttgcaggccgtcgaggctgctggtcggcggctcggtgccttcgatgatctgcttgaggcgtgtttccaggcgggacacgtccacgccctggttttgcccgaacggccgcgccttgcccaattccagggtgaacgcctcggcatcgagttgttcgtaggtaaacgcggtgaacgtgatcgaggtcttgttctgcaacagcaccgcttgcatgccggcagcgttcaggcgcgccagttcatggcgtgaatgctggcgaccttccttccatgggtacagggcgaactgctcgatcttcgagccgcgaatggccgtgtgcaggtcgtaatgcaggcgtgaacggcccggcaggctgaaaaaactgcgggccagttgctccagctcggcggcgcgcatggcctccggaccaatgtttttttcatgccgaccgttgaacagccggttgacgtccagttcgaggtaacgctcgccgcggcgcatggcctcggggttgccgaacaggaacagaatacgggtacggggcttgatctccccacgggcaatgccatgcaacaggcggtcgagcagttcgatcggcgcggtttcgttgccatggatgccggacgacagcagcaggtcgctgccgttgtccttcgcctcaggcgggcgcacttcgagtgcgccctcgctgagccagcgcatctgcacgccgtcgacagtcagttgaattttttgcgccggttcgcgaccggcgagggtcagttcaagcagtttgccaagggcgagcatacgcagcttccttagtggttgcagcctgggccgtggacgtgatcgtcgtcatcaccttcaacatcggccggttccatttccagttgcaggctcatcaggttggtggccaatgggcgcatcagcaggttggcatattcggcgtcgccctcttccacgtccacgccgatcagcagttggccacggccgtcgtgctggatccagatttccttgccctgccagaccacggcgacgcgggtgcaggaagtttccagctgggtgccgtcggtgtcttcaagaatcagtttcagggtgtcggtggtcataatagatagttctcagccgtacggcgttaattgatctggaaaggataaaccgcgcccagtttaaggatttgcgtcagttcatccagtgccgtccggcactcaagcagcaattgcgggtcagccaggtcgctttcgcgcaggctgtcgcggtagtgcttgccgacccactgggtcagggtgtcgtacaacggcgcggtcatgataacgcctggattcaccgccgccagctccgtttcgttcaacgctacgcgcaaacgcaggcacgccgggccgccaccgttctgcatgctttgcttgaggtcgaacaccttcacctcgcggatcaggccaccggcagcggtcaggttttgcagatactgccagacgcgttcattggcgcggcattcttccggcacgatcagcagcatcgaaccatcggcgcggctcagcagttggctgttgaacaggtatgaacgtaccgcgtcctcgacgctgacctgggcgcggggcacgcacaccgactggaagttaccccccagcttggccaacttgccttgcagctcgccgagcatctgttcggtattgaggaacgcgtcttcgtggtagaacagcacttcgccgttacccaccgcgatcacgtcgttgtggaataccccggcatcgatcaccgccgggttctgctgggcatagaccacaccgtcatcctgcaaaccgtgcaaacgcgcgacggcctgggaggcttcgagggtctggcgcgccgggtacttctgcggcgccgggtagcgggggtcgaacgcgctgcgaccgaacacgaaaaactcgacacccgcctcaccgtactcacggcagaaacgcgtgtggttggccgcgccttcatcgccgaactgcgccacggcgggcaacgcggcgtgatgggcgaagtgcttctgatcagcgaacatcgcccccagcacacgactggtggtcgggtgctcgatgctgcggtggtacttgcaattgaggttggcggcagtgaaatgcacgcggccatccgccgtatcggcgctcgggctgacggtggcggcgttggccacccacatgctcgacgccgagcagctcgcgaccagcaacggcatagcgtctttggccgcctgctggatcacttgcgcgtcggtgccgctgaaacccaggttgcgcaaggcggccacgtcaggacgttcctggggcgccaacacaccttgtacaaagcccatgtccatcagggctttcattttctgcaggccctgcaacgctgcttccttcgggttggaatgctgctggctgttgctctgggacgcgacgttgccgaaggacaaaccgccgtagttatgggtcggccccactagaccgtcaaaattgacttcataggatttcatcggcgaggctccacgaacatctgtttttataagcaatcttcagtactacagagatccaatgtgggagggggcaagccccctcccacctttaaatcagtgtgatgccgggggtcagcgtggcaggcaccaccaggctcggggtctcaagcgaggccaccgggtacgcacaataatccgccgcgtaataggcgctggcgcgatggttgcccgacgcccctaccccgccgaacggcgcggtactcgcggcgccggtcagttgtttgttccagttgacgataccggcacgactttccagccagaactgctggtagcgcgcttcggaatccgacaacaagcccgcggccaggccgtactgggtgttgttggcctcggcaatcgccgctgcaaagtcagcgtagcggatcacctgcaacaaggggccgaacagttcttcgtcttcacgctcggtcacaccggtcacgtcgatgatgcccggcgtgagcaacgcggcctgatcctgtggctgggtcatctccaacagcgccaccgcaccgttggccaacatcaattcctgggcgtccatcaaggctttggcggcgccgagggaaatcaccgagcccatgaacggcgctggttgctggtcaaacgcaccgacctcgatggtcgcgctgaccgccaccaggcgcgccagcaacgcatcgccccaggcaccttcgggcaccaacaggcgacgggcacaggtgcaacgttggccggcggagataaacgccgactggatgatggtgtagaccgccgcatccacatcggccacttcatcgaccaccagcgggttattgccgcccatctccagcgcgagaatcttgtccgggcgcccggagaattgctggtgcagatgattgccggtgcggctggagccagtgaagaacaacccgtcgatgcctgggttggccgccagggcgatgccggtttcccgcgcgccttgcagcaggttcagcacgcccgccggcaggccggcttcgatccagcactgcacagtcagctcagcgactttaggggtcagctcgctcggtttgaacagcacagtgttacccgccagcaaggccggaacgatatgcccgttcggcaagtggccggggaagttgtaagggccgaacaccgccaccacaccgtggggtttgtggcgcaatacggcggtggcatcgcccagcgagccgctcttctcgccggtgcgctcgcggtagctttgtaccgagatcgcgatcttgttggccatgctggtgacttcggtcgctgactcccacagcggcttgccggtttcctcaccaatgcagcgtgcgatttcgtcggcgcgttttttcagggtggcggtgaaggtctccagtacgccgatgcgctcttccagcgaacgtctggcccaggaggggaaagcctgacgcgcggcctgcacggcggactcgacctgttcggcggtggcgccattaccggcccacagcacctgctgggtcaccgggttgcgcgattcaaacagctcaccctggccagccagccagctacctgcgatgtacagcgaattcattatttcgactcccgagcagcggacaacggtacggcacgcacttgatcgcccaccaccaaacgcaggcgcttggcggtctgcgggtcgaccaccagggttccggctgcgaggcgggccggggcggcggtgatgcggcaatcttcgcgtttgcggttatggatcaggaacggcgtggcgtcgtcgcctggggtgccgatcgccaataccagtgtttcgctgtcgcgaacggcacggatcttctgggtctcacactccaccgcaggtcccgcgtcgaaaatatcgacgtagccctggtagctgaagccttcactcttgagcatgctcaacgccggttcggtatccgggtggaccttgccgatcacgttgcgcgcatcttcggaaaggaagcagctatacaacggaaacttcggcatcaactcggcgataaacgccttgttgcccacaccggtgaggtaatcggcctggctgaattccatcttgaagaagtgccggcccaggctttcccagaacggcgaacgcccggcgtcgttggacaccccgcgcatctcagcgatgatcttgttaccgaacaactgcgggaattcggcaatgaacagcaggcgcgccttggccagcatgcggccgttgaggccgctgcggtaatcggcgtgcaggaacaacgagcacagttcggaattgccggtgaggtcgttggccaggaacagcgtcggaatctcacggtagatgttcagctcctgggaggcgctgacggtcaagccaacccggaagttgtaccaaggctcacgcaagccgacggcgccggcgatggcggaaatgcccaccactcgaccctcgtcgttttccagcacgaacaggtagtcggcatcgccgcgcccggcgtcgccgcgaaaggttttttcggcccagcccacgcggtgggtcaggcgctcttcgttggccggcaaggtggtgaggccggtgccggtgctgcgcgccagatcaatcagggccggtaaatcgctgctgcgtacgggacgaacgatcatgctatctcctcgaacgggccgctgttgtcagccacccgcgaaactctctttttaaaccgctaccaggcgcacgctcgcaccttcgccaacacccagggcctcggccgctgccaggtccaacgtcaccggtttacccggcgcgtagtccagctccagcatcaccgcgcggtagtcctgcaattgcgcgttgctcaccaggtactggcgaccgacgcccttgaccatctcgccgatcttcaccggcactacgcggctctgggcgatcgagcgaatgcccgagacccgtgcgtgcagcgtcgggccgccgtcgaaaatatcgatgtaatggtcggtctcgaagccttcgcgcatcaggatgtcgaaggtgatctgcgcacgcgggtgcacctggcccatggcttcctgggcttcgtccggcagcagcggcacgtagatcgggtaatgcggcatcagctcggcgaggaaggtgcggcttttcagcccgcacagacgctcggcggcggcgtagttgaggtcgaagaagttgcggccgatggcgtcccagaatggcgagtcaccgttctcgtcgctgtagccgacgatctcggtcaccaccgagtcggcaaagcgctcgggatggctggcgacgaacagcaggcggccacgggaattgagttccgaccacggcgaaccgaccagctcgggcaccacgtagaaactggtgagcaggctgttgccggtgaggtcgtggcactgggaaagcacgtggatcttgttgtggatcttcagctcgcgggaagcgtgcacgaaggtctcgttacggaagctgtagaacggctcggagtaaccggccgacgcgacaatggccgagcagccggcgagcttgccggtctcggtgtcttcaagcacgaagaaatagctttcttcaccgttgaagctcacctcggcggcgaaagacgcttcgctcgcggcgatcttgtcgctcaggcgttccacgtcgtccggcaaggaggtgacaccaatcgggctgtccgcagccagacgctgtacctcgcccagatcagccatttgcgcggggcgcatcaccagcatggtgtcactccttaactcgaaaaactcataggaaaaaataccggacagttcctgattcaacgcaggtcaaatgtgggagggggcttgcccccgatagcagtctgtcagttgataaatcaggtggctgacccatcgctatcggggggcaagccccctcccacatgacacggtccggcaaataagggtgtatcaggcttgcgtcagcgtttttactgcacgttcaaaacggtccaggccttcctggatgtccgcgtcttccaccaccaggctcggcgcaaaacgcaccacgtcggggccggcctgcaggatcatcaggttttctttctcggccgcgttgaacacgtccttggccttgcctttgaacgcatcgctcagtacgcaaccgagcaacaggcccatgccgcgcacttcggtgaagatgccgtattgcttgccgatctgctccaggcgcgccttgaacagctcgtgcttggcattcacgccagccagcacctcaggggtgttgatcacgtcgatcaccgcttcggccaccgcgcacgccagcgggttgccgccgtaggtggtgccgtgggtgccgaccaccaggtgcttggccaggtcttcgcgagtgagcatggctgcaatcgggaaaccgccgcccaggctcttggcgctggtgaggatgtccggcaccacgccgtagtgctggtaggcgaacaggtggccgctgcggcccatgccggtctgtacttcgtcgaacaccagcaaggcgttgttggcgtcacacagctcacgagcaccttgcaggtaggccagttcggccggcagtacgccgccttcgccctggatcggctccagcaccacggcgcaggtcttgtccgacaccgcggctttcagcgcggccaagtcgttataaggaacgtgggtgatcccggtgattttagggccgaagccatcggagtacttggactggccaccgacgttgacggtaaacagcgtgcggccgtggaagctgttcagcgcggcgatgatctcgtacttctcggtgccgaaacggtcgaacgcgacacgacgggccagcttgaacgcggcctcgttggcttcggcgccggagttgcagaagaacacacgctcggcaaaggtggcgtcgatcagcttatgcgccaggcgcagggccggctcattggtgaacacgttggacacgtgccacagcttgttggcctgttcggtcagtgcaccgaccagcgccgggtgggcgtggcccaatacgttgaccgcgatgccgccggcaaagtcgatcagctcgcgaccagcctggtcccacacgcgcgaacctgcgccacgcacggggatgaaggcggcaggtgcgtagttgggaaccatgacctggtcgaaatcggcacgttgcaccggggcttgctcaacggacatcggagtctcctgaagaggaacgcctgcctggaactggcgggcgatgcagggattgtaaggacagttttcagtagggccttgtcgccaagcgacaacttcttatagcgccaacccgcgttttacgcgggtttacgccaatgcgacaaatagcatcgcaatggcgcagtttaaacgctgcgcgccgtttgcgtgagggccagacgtgccggcggcataactatctaaagtccggcatgccggggcggctgatttactcgtggtttcgagcccctcatggatccgagcatgacaaccccgacttctcctgtaccggcagtcagcgataacagccgccccgaccaagactttgaaccattgaccggcgccctgcccggctggctgctcagcgcgtccgtgcgccagcgcgaggcgttcaaaaaagctgcgcccctgcctttacccaccgccaacgccgcgcagcaagccgccttcaaacagctgaacggtgcacattggcaagcccagagacgcgtcgacaacgcgctcaaggatctcaaggatcccaaggcgttcggcaaacccttgcttgcagacgccttgaaacagcagttcaaccttgaactggatgtggaagcgacctttatccgcctatacatcccgctgaccatcccttggtttcccgtgcgctctggcgccgcccgcgcctggaccgtatcgctgctcgacgccgcactgcacaacttcgaacacaaggaaacccaggcggacgcttatgaaccggcctccacctacatcacccgtcccgacgcttccggccggttcgacaccttgccggcgatcaaacaccaactgccggtcgctgccttcgcccaactgtgtcgcgacctcgacctgggcgcccgttacatgcgctacctgcgtagcgggctgggcatggacagcccggtcgccagcgcggtgctgcaaaccaaggtcgacgccagccagaaagccgccctgcgcgcagcgctgcaactggcacggctgcagcaggatatccaggacgattacgcgcaggtgatagagggtttcatcgatggccgtaccggcctgcgcctcggcacaggtccggtgctgtgccatgaattcagcatgatgggtacaccgctgaccggtatcctgctgttcgcaccggatcttgaaaacacccgtagcgtgcggcgcctggtggcctatgtgccagatgacccggaacacccgctcaaggaatatcgctctgcgctggcattcaagcaggaactgacccggcaactgcgtacccaggactatcaggcgttcttcagtcgcttcgtggcccatgaacacctcggggcgtttttcgccgacctcagccagcgcctggagaaaatcacctggcaccccagtgatcaaggcaaaggtctggccccttggcgcgccgaacccaccgacgatcccacgctgcaattctccgccatcccgatcatgggcgatccgtgggtattcctctatcaatccaggctgaacaaaatcctcaacgacgcccgcaccctggcggtcgccaccgccaccgtggaccgcaacgcccgctgggcgcggtgggatgcgttcgtcaatgtggcctcctccattgtgaacacgctgctgatggtggttgcacccttcatcccggggcttggagagctgatgctgggctacatggcctatcaactgctcgacgacgtcttcgagggcatcgtcgattgggccgaagggctcgaccgcgaagcgtttgcacacctgatgagcctgctggaggctgcggttcaactggggctgtttacggccggcacgcaaatcggcgtgcctgagttacgcaaactgttgtcaccgcaaaccctggccttcatcgatcgtttcaaaccggtcaccctcgccaatggcgcccgccgctactggcaacccgacctcgagccttaccagcagaagctgcaattgccgccgcacctgggtattgacgcacgcggcctgcatgacgtgcgcaaggaatcgatcctgccgctggaaggcaaactctatgcggtgaaaaagtcccctgaggacggccagtaccgcatccaacacccaacacgggccgacgcctatcaaccccagttgcaccacaacgagcacggtacctggcggaccgaactcgaccaaccgctgcaatggaccaaacccaccctgctcggccgcctgggctaccgggcgcagggcctcagtgacgccgaccgcgagttggccctgaccctcagcggcacccctgaagacggcctgcgcaagatgcaccttcacagcgagcccctgccaccgttgctcgatgacgccctggcacggctgcgcatcgagcgcgacctggacaccctgatccagcgcctgaacagcgatgacccggcagtgtacggccgtatcgacccgcaggacctgctgcaactgctcaccgccaacggctcatggccacacacccggggcttgcgcttgctggatgatcagggccgtgtggcgtgggtcttcggcgatcagtccaagcctctggtgcaaattcatgaagcacaattgaccaacggtgacttgctcaaggcggtgctaaaggcgctgaccccggaagagatccgcgcacagttcggcgagcgcgccagcgacccgcaattgagcctggaaacccgcgcgcgcaacctgaggaagcggctggccgagatcgcacgcaagcatcgaggcgccctgttcgaatcgcgctatgggttccggcagcattccgcacacccccaggcccagcggctgatcgacagcgcccccggcttgcccgcatcggtcgccgaaaagttgctgggccaggcaaccgcgcaggaactgacggcactgcgcgaacagcgcacgccaccgcgcctggcgcaactggcccaggcggcccttaccgaggtacgcctgaaccgcgcctacgaggggcaacacctggactcgcacatcaacctcgacagcgaccaactgacgctgagcgcactgcgattgctgccaggctggtccaccgacgtcaacctgcaagcccggcaccgcaccatcgacgggccgctgtggcgcagcatcggccccgacaccgcccccatccgccgcagcctggtacgcctggacagcggccgctacgtgccctatgacgagcgcggcccgctgtccggcgagaccgacctctacaccgccatcctccacgccctacccgatgcccagcgcgatcagctgaacatcggcatccaccaaggccctgaactgcgcgaacgcctgcgccaacacccgccgccacgccacgagctgcgggtactgctgggcgccgagccggaacccgccgtcgaaaccctgcaactgctcggcaacgatgcgggttatgcccaacaaccgcgcaccgcgggcagcccggtgagcctgcagcaacgggcacgtaccctgtaccccggcctgagggatacccaactgcaagcactcattgaacagttgcagactcgcccgggcggcgcagcaacacagctcgctcaattggcccgggaatatgcacaactgaaccgagacctgctggcctggcaaacggatattccgacccaccacccgaccagcgcccaggcgttgagcacctgggagcggcgccaggaggaacagaaccgcttgaccattgcccatcagctcaagcaagcctggcgccgcgaaaccaggatcgacgattactacgaagacccggcccgcgacggccatgtgctgaacctgaacgccaactttctcggcgagctgccacgcctggacgcccagttcgatcacatttccatgctgctgttggacggctccgagtatctgcagggcgtgctgccctttctcagccgctttcccaggctgcgccagctgggggtcatgaacaccccgctggatgttctgcccgcacacataacctcgctgcctcagttgaattcactgcaattgagcaattgccggatcaccctcacgccggagagcctggcgcggctgtcggcgatgcatcagctgcgctcgctggacctgaacggcaacccgctcggcctcgtccccagtatcgaggccctgcctgaactggtcgccctggacctgtcaaataccggcatcgagcgcctgccggccggcctgctaagccgtacggagctacaagccgctatcttgaacgacaaccggatcagcacgttgccgcaggccatgttcgaattgtcggccgagtccagccgccgtttcgacctgtcgcgcaacccgctctcacgggcgacgctggagaaggtcaagacctactaccaggcacacggcacctacctggaggccaatgccctgcccgccgacatgcgtgacgcacaacggctgtttccgacgttccgcgacgagcagatcaaccggttcatcttcgacctgccgggcgacatagaggccggcagagtggccctggcgcaattggccgccgactatcagaccctgaccgaggaactccagacctgggcccgggcccccgccctctccgacgtagagcgcggacgccgaaccgtactcaaggaactgctggaacgcagttggcggcgcgaaaccccgcaacagacccgctggctcaactccctggaaatctcaagcgccctggccggtgagctaccgcagttgagcatccgcttcgagcatatcggcggcattcgtatcgagggtaacggtcgccccctgcacctggatcacttcctgtccagcttcaacaagctgaacgttgtcgacatcagcgacgcgccgctgggggatatccccgcgccgttgttcaacctgcaacgcctggagtttctcggcctgccccgatgctcgatcacgctgtccgccacttccgtgcgggggctggaagggttgaaccgcctggcgttcctggacctcaaccacaacccactgggactcatgccggacttcaaccgactccctcaactgagccgcgtgcacctgcgcaacaccggcctgcgcgaagtgccgaccggcctgctgagcagcgaactgcatgcggcggttgacctgagcaacaatgccattgaggacctgcctgcgagcctctctgatttgcccgacgcgatcgcccggggcgttgacctgtcgggcaacccgttgtccgggcaggcattggaacggatcaaggcctattgccaacgcaccggagagttcttcagagccagggtttccgacgctcagcgcgcacgcgtgcaacagctctacccgaccttcatcgccagcgaggccgatcgtttcagcttcaaactgccaggcacgatgagcgacatagacgctgaaatgcgcgagctcgaagaggaataccgccagctggacaccgacctggatgaatggattgtcgatgtgccgacgcaccacccgatcctcgacatccccctggacgaacagacacgcgccgaacagcaattggtaaggcgcaatttcaagacattgctcaaacaagcctggcgttatgaaagccccgaagacgaagagagcctcgatgacgatctgacccatgcagtgacactcgaaacgccgatactcggcgcactgccacaactcaatgcgcgcttcgagcatgtgacttcgttcgaactgatcagcgacggcacaaccaccgaagtcgacggcaccctcagggggttccccgagctgcagacactgaccctcaacagatgctcattgcaaaccctgccgacgtcgattttcagcatgccgcacctgtcctccctggaccttgccgaatgccgactgagcttgacgcccgaaagtgcgcgctcactggaaaacttgaatggcattgaattcctcgacctgagcaacaaccctctgggccacgcgccagctgtcagccgtttgtatcagctgagctcgctgcacctgcgcgatgcccaattgcgtgaggttcccgagggagtattccaactaccgtccctgcatacgctggacctgagcaacaacctgatcgagacgttgcccgaggccatactggaagtcgcaacaaccctcgacaacgactccgacctgcgcggcaacccgctgtctgagcacagtctggaattgttgcggcagtactacctgcgcaccggttttgccctgtatgtccaggcggctacacgggatgccgcgggcaaccggttgattccaccgcagggcccgccagaagaggagtgaagcaggcgttcaaccgcgttccgacggcaccgatgacagttcgaacgggctgctgctgcgccgctggttgcggtcttcacggggggtggcgccgaagaaattgcggtaggcgctggagaaatgcggccccgaggagaagccgcacgacaggccgatctggatgatcgacttgctggtttgcatgagcatctggcgggccttgttcaggcgcagttccaggtagtactggctggggacgcggttgaggtattgcttgaagatgcgttccagttgtcgtcgcgacacgcagacgtgctgggcaatttcgtcggtggtcagcggttcctcgatgttggcttccatcagcaacaccgcctgggtcagcttcggatggctggaacccaggcggttttgcagcgggatacgctggcgttcgccgccttcgcggatacgctctaccaccagttcctcggacaccgcaccggccagttccgcgccgtgatcacgggccaataccgccagcaacaggtcgagcaccgacatgccaccgcaggcggtgagacggtcgcggtcccagtcgaacagatggctggtggcgatgaccttggggaagcgctcggcgaaatcgtcctgccagcgccaatgcacggcagcacggtagccatcgagcaggccgagctgggccaacggatacacaccggccgacagaccaccgatcacacacccggctcgcacaagctgcttgagcgcagtgctcagttgcgaggcaatgacagtaggtggctcatccgccagcaggaacagcttctggaaaccctcgagcttgccggcccacggctcgcccggcagttgccaggcaccttcggtggccggttctgcaagcaggaacgacagctcgtagaccacatccggatgcacccgctgggcaacgcgcaaggcctcctcagccagcgcaagcgtcagggcttttgtgctgggccaaatcaggaaaccaattttgtgggcggtcatggagtgctatccgaagccagtaacagtaatgaagacaagggccaatgctagcccgtaatcgagtacaaatctcaaaaacgatgcatatccaatgtgggagggggcttgccccctcccacacaaagcaaaccccataggcaggaattacttcaggctgccggacaggaactgctgcaaacgctcggactgcgggttcaccaacacttcccgtggattgccgcgctcttcgacgatgcctttgtgcaagaacaccaactggttcgacacctcacgggcaaagcccatttcgtgggtcaccaccaccatggtacggccttcctgggccaggtcctgcatcaccttgagcacttcgccgaccagttccgggtccagcgccgaggtgggttcgtcgaacagcatcacctccggctccatcgccagggcacgggcaatcgccacgcgctgctgctcgccaccggacatgtggccggggaacgcatccttgcgatggcccacgccgactttggccaggtaatgctcagccttttcacgggcttctttcttcgacatgccgagcacatgcaccggcgcttccatcacgttttcaagcgcggtcatgtgcgaccacaggttgaaatgctggaacaccatggacaggcgcgaacgcatgcgctgcagttgcttggggtcggcggccttcatggcgccgtccttgttggccaccaacttcagctcttcgttgttgagcaggatcttgccggcgtggggttgctccagcaggttgatgcagcgcaaaaaggtacttttgcccgaaccactggaaccgatgatgctgatcacatcaccggccgcggcggccagggacacacctttgagcacttcatgactgccatagcgtttatgcaggtcttggacttcaagtttgtacatgcggtcggttctcacaaaaacaggtggtcagtcgttgagcaagcgcccgtgacgcagcgcttcgcgccccgccaccttggccagccagaaacccgcttgggcataacgtagccgttcaacggcaaacagcacccccgaggtgcccgcgcacagggtgctgacgcggtcttccagggggtcaatcacttcaaagatcggttcgcctttttcgacccagtcaccggctttacgcaggtaactgatcaccccggcgtggggcgcgaacagcagttcagtgccttcaaacggtacgccttcgcacggctcgtattgcggcgcgggccattcacccttgatcaagccctgctcggcaaggaacgccaggatgccttcggcgtggaagaccgcttcgtcgcggccggtatcagcctggccacccagttccagagtcgtcgccaggcaggccagcgggacctgtgcgtcgggaaacgcctgggacaagcgtagccacggcagcgaacaggcttcatcgaacgagctgccgccggagtcttccgccagcaggccgactttcagattcaaatgggccgacagcgaacgccactgcggccaatgctgcggcagcgcatacatgtgcagcgcagcttcggcatcacaatgcaggtcgagcaccacatcggcggtgcaggcatggctcagcaggatgcgctgcatgccctgcaactggctgctcggctcgggcagcgcgttaagcgtgtcactcatggcctggcggatcatgcgcacgttggcgtggggatcatcgcccagcttgccgtcaagcaatgcggcaaccggctcgctcaactcgacgaaatcgcggttgaaattcttgccgctgccgacctcgaaacgcccctggtggctgccttgcagcagttggcccaggcccatcgggttggccaccggcaccagctcgatcacgccattgagcgcaccttgctgttccagttcgacaaggcgctttttcagctcccacgcggcgcgcatgccgggcagttcgtcggcgtgcaggctggcctggatataggccttgcgctcgcccttgccgaaacggaacacgctcagttggcgctcgcagcccaggtgactccagggcaaccggtgatcgatacgttgcatatcagtgcttcctcggcgccaggtagctcagccagcggcgctcggccaacttgaacaggcgcaccaggatgaaggtcaggcacaggtagaacacaccggcggtgatatacgcctcgaacggcaagtagaactgcgcgttcacggtgcgtgcggcaccggtgatgtcgatcagggtgacgatggaggccaggctggtggtctgcagcatcatgatcacttcgttgctgtactgcggcagcgcacgacgcagggccgacggcagcaggatacggcggtacagcttgtagcgcgacatgcccatggccttggccgcctcgatctcgccattaggcgtggccttgaggctgccggcaatgatctcggcggtgtaggcgctggtgttgatcgcaaaggccaggcacgcgcagaaggtggcgctggacagcagtggccacaggaaactctcgcgcaccgcctcgaactgggccaggccgtagtagatcaagaacagctgcaccagcatcggcgtgccgcgaatcacgtaggtatagagccaggccgcaccattgacgatcggctgcttggacacgcgcatcaggcccaggggcaaggccgcgagcaggccgaagaacagcgagatggcgagcagtttcagggtggtcaccaggccgccgaggtacagcggcatggcctcccagatgacgttgtagtcgaagatcatagatcagccgcccttacgcctaccgagtagcgcttctcaagatgacgcagggccagcaacgacacgctggtgatcaccaggtacatcgccgccactgcgaggaagaaggtaaaaggctcgcgggtggcgtctgccgcctgcttggccttgaacatcatgtcttgcaggcccaccaccgaaatcagcgcggtggccttggtgagtaccagccagttgttggtgaaaccggggatggccagacggatcatctgcggcaccatcacccggaagaacacctggaaactgctcatgccatacgccaggccggcttcggcctggcccttgggaatggccatgaaggcgccacggaaggtttccgagagataggcgccgaagatgaaacccagggtgccgataccggcggccaaggggttcaagtcgatatagtcgtcatagccgagcatcggcgcgacgcggttgagcaggtcctggccgccgtagaaaatcagcaggatcagtaccaggtcggggatcccgcggatcaccgtggagtacaagtcacccaaccaagccaaccagcgcaccggcgacaggcgtaacgcgaccccgatcagacccagaacaatggccaaggccatggacgacaaggcgagctgaagcgtcaaccatgcgccatcgaggatgacggccccgtagcctttcaacatgattcaggtcctcgaaaagggggatgaaaaaatggcgcaaacctcaggaattctgttgcttgcgccatttgggacagacagctgcgacgagttacttagggtcagcgccgtaaatatcgaagtcgaagtacttgtcctggattttcttgtattcgccgttggcacggatcgccgcgatggccgcgttgatcttgtccagttcggccttgtcgcctttacgcacagcgataccgatgccgtcgccgaagtacttggcgtcggtgaactgcgggcccacgaacgcgtagcctttaccggccggggttttcaggaagccgtcttgcagcagggtggcatcagccacggtaccgtcgaggcgaccggcttccacgtccaggtagatttcgttctgcgagctgtaaggcacaaccgtgacgcctttaggggccaggacttccttggcgaaacgatcgtggatcgaaccacgttgcacaccgatcttcttgcctttcaattcatccaggctgtcgctgacggtggtgccttccttcatcaccagctgcgctgggctcaggtagtagcggttggtgaagtccacggacttcttgcggtcgtcggtgatggacatggacgacaggatcgcgtcgatcttgcgcactttcagcgcagggatcaggccgtcgaattcctgctcaacccacgtgcacttgactttcatctctgcgcacagggcgttgccgatgtcgtagtcaaaaccgacgatgctgccatccggcgccttagaggcaaacggagggtaagccgcttcgataccaatcttcaggggcttttcatcagcgaaagcctgcatggacagcacggacagcgccagggcgcccaacagcacgagtttcttcatcttgggactccatcggtatagggcaaaacagcagtatgagccatggcccacgatgcggcgtaagggaaaccgaatagcggtgctgcgtcctacaccgattcaacatcggagacgacgagcgagtgatcggcattctaacgacaggctggaagccgatatttcctcaatgcgacaacaatttacagaagcaccgagaaagcggatccaactcattgacagcctctggattttatgcagagacaaaagacattaaacctgtagacgctgcaaattgcgggcctattattcgcaaacccttctggcacggcaagtctggcgtttaatcttatttcctggggtgtctggaatggggtttttcggggcgcagacgtagcacattgcctcaggtttgggcgggaggttacacattgagggttggcggtaacattcagaaacgccctacacgaaaaaccgatatttatttgactggcgtggatcccatgtgggagggggcttgcccccgatagcggtgtgtcagtgaaaggcatttcaactgaaccacggcaatcgggggcaagccccctcccacactggatctccggtgcttttgaggccgctcaaaaaagccccacccggcttacaccgggtggggctttatctgactatcccgccttacgcgacgttcatggtcttgtgcgtctcgatcaaatgcgccaccacacccgggtccgccagggtggagatatcccccagcccgtcgtactcagccgtggcaatcttgcgcaggatacgccgcatgattttccccgaacgcgtcttcggcaagcccggcgcccactggatcacgtccggcgaagcaatcggcccgatctccttgcgcacccagtttttcagctccagacgcagcgcctcgttcggctcttcgccgtttttgagggtgacatacacatagatgccctggcccttgatgtcgtgcggcacacccaccaccgccgcttcggcgactttagggtgggcaaccatggcactttcgatctcggcggtgcccatgcggtggccggacacgttcagcacgtcgtccacacggccggtgatccagtagtaaccgtcttcgtcacgacgcgcaccgtcaccggtgaagtacatgccacggaatgtcttgaagtaggtgtcgacaaaacggtcatggtcgccgaacagggtacgtgcctggcctggccacgaatcgaggatcaccaggttgccttcggccgcgccttcaatcaggttgcccaggttatccaccaacgccggcaccacgccgaagaacggccgtgccgccgaacccggtttgagcgcatgggcgcccggcagcgggctcatcatgttgccgccggtttcggtctgccaccaggtatcgacaatcgggcaacgggattggccgacgttcttgtagtaccagtcccacgcctctgggttaattggctcacccaccgaaccgagcaggcgcaggctggagccgtctgcgccttcgcacgcagcagtgccggacgccatcatggcgcggatcgcggtcggggcggtgtaaaggatattgaccttgtgcttgtcgacaattttcgccacccgcgtgatgtccgggtagttcggcacgccttcgaacagcacggtggtcgcgccgttggacagcggcccgtagacaatataggtgtggccggtgacccagccgacgtcggcggtgcaccagtagatttcgcccgggcggtagtcgaacacgcgctcgtgggtcaggccggcgtacaacagatagccgccggtggtgtgctgcacgcccttgggcttgccggtggagccggaggtgtagaggatgaacagcgcttcttcagcacccatctccttgggcgcacacacagtgcccgctactttcatcaggtcttcgtaccagatgtcacggtgctggttccacttgatctggccgttggtgcgcttgcacacgatgactttctggatgctgctggtttccgggttggtcagggcgtcgtcgacgttggccttcagcggaatcttcttaccggcacgaataccttcgtcggcagtgatcaccaccttcgacttacagtcgatgatgcgaccggccagggcctccggcgagaaaccaccaaacaccacggaatgaatcgcaccgatacgggtacaggccagcatggcgaccacggcttcggggatcatcggcatatagatagtcaccacgtcgccgcggtgcacatcctggccgcgcagggcgttggcgaacttgcagacttcttcgtgcagctcgcggtaggtgatgttgcggctctcggcagggtcgtcgccctcccagatgatcgcaatttgatcgccacgctcggcgaggtgacggtccaggcagttgtaggaaacgttcagggtgccatcggcgaaccacttgatgtcgacgtggtgatcgtcgaaagaggtctgcttcaccgtggtgaaaggcttgatccagtcaaggcgcttggcttgctcgcgccagaagccatcggggttgaccaccgactgctggtacatggccttgtaggtcgcctcgtcggtcagcgtgttggctgctacttcggggcgaacggggtacagggaagccgcactcatctttcttacctcggtgacatagttgttgttgtatggccctgttgtagccggggccgacctatagaaccattcgacgatggtagtaacaagcccctacaaattgccctgatatccccgtttgcacctctagcccgcgggccgtggcgctttgcggctttgtgaaaaaagctttaccacaggattgttacaaaaaccgccaatagtgtttatcaaaagcacgggtatatgaatataacgtgagggcctaaaatcacttccgccaacaaggcactgtagttaaatacagcagtgattaacaacgcaacagcccccacgaaggcaacgttaatccgaacttcccaactcttaagttacacacgtggcctcacaagggccccgtgacccctttcgccctgaagaaggtaaatagagaaatgaaagctttagtagttatggccctcagcagcttgtgcgccaccgccgccctggccgacgaagccccgactgacgtagctggcagcaaccctccgatcgttgaagactacacttacagcacccatctggatgtggcaaaagtactgtccatgagcagtattccggaagtgtgcgaagtggtaccggtgaagatggaatatgaagactcacagggtcagcgtcatatacttaattaccatgtgatgggcaatggttgttctaacgggtaatcacttggttagtttgaacttattcgccgcaagaaatggttcttgcggcaaagcaccgccccccttcccccctcgctgcacatcctcaaaaaaaatcctgccgctcgcccctccagccaaccccaataaacccgagccttggctcgaaaagcaggctttttgtctgcgatccgtgaccatccgccacaacacaaagccgattttttccctataatgcgcgggtaaatcgggcctgcaatatccctttacacagggatgaagagccagacctgaggcctcccgctggagcaagcaaccaccgctccgcacctcaagcctcacgcagagcacccgtaaccctattccgtttaatgcgtgcgctagctgcaacaaacgattccttaagatccaccgcggccctgggggccgtgtgaacacccaaccatccggtttcacacgggcacctttgagccctcacgcaggagacgacacgtcatgctgagctgggacgaattcgacaaagaagaagaaggcgaagtggccaccaaaggcgccaacgccggccacgccaccgaagccaacatggaccgcctcgacggtgccggcgctgccgccgccatcgaagcccgcgccgtcaccgccagtgactccgccgccatcgtccgcgccaaggccgccctcgacaaactcgacgtcgccgaaggcctcgccgaactcgaaggcgcctccgcccgtgtcgccgttgacgaaaagcgcatgatcaactgccgcgccgacctcaaccaactcgtacccttcaagtacgactgggcctggcagaagtacctcgacggctgcgccaaccactggatgccgcaagaggtcaacatgaccgccgacatcgccctgtggaaaaaccccgaaggcctgaccgacgacgagcgtcg

SEQ ID NO: 51 - DNA, 260781 bp, Pseudomonas nodulensis
  misc_feature (100071)..(100071): n is a, c, g, or t
  misc_feature (140065)..(140099): n is a, c, g, or t
caggtaccaccaacccgttcccgtggatgagcgaaatcatggacttgaagaaagagaaaaacttcttcgagacccgtgtgatcgagtaccagactggcggcgcgctgagctgggattgattcctaagccaagcaaccccatgaagccctgacgtgttcagggcttttttgtgcgcggtgaattgctacttcttgaagcacatcaggctgaccacctcgcccagaagggttcggatcgcaccaccaatgctgtagccttgtgccccaattgccatcagcgttgtcaccggtcgagtgaccgggatgccttcaccgaagggctttacgccaaagtcggaagattggcacgggagtagactcccgctgtcacacctgatgcacactcaataaatacccgataggaccgaggccaacccgtgaacccagacatgctcgaagccggccccgctgacgccaaagtactttccgtctttgacttcgacggcaccctgacccaccacgacagtttcgtgcccttcctcaagtttgcctttggccccggcgagttctacggccggatgctcaagctggcggtgccggggctgcgttttctggtgcggcagatcagccgggatgagttgaaggcgcagttgatccgcacctttatgaccggggtggagaaggcatgggtgcaacagaaagccgaggagtattgccagaagacctgggcgcggctgatgcggccgacaggggtgttatcggtggagcaggagttgggatccggggcggaggtcacgttgtgttcggcgtcgccggcattggtgttacagccgtttgccaatcggctggggatcaagctgatcggcacggagcttgaggtggtcgacggggtgttgaccggcaagctcaccgggaataactgccgatgcgagaacaaggtgctgcggcttgaggcggtgtacggggatttgggcgactatcggctgcgggcctggggcgatacgcgtggggatcgggagttgctggcggcggcgcaggatgcgcattttcggcattttcatgcgaagaagaagcgggctcggttgcagcgatgatgcgggtgggtggggttggcgggtagaccgagggtcgcgcactagcatggggtgccagtgcgcggatggcccattccgatcaatcgtcaccgctacccaattcttgatcttcaaatgtggatcgcaccgcttccacaacccgttcggctaggtgaatcacttccagctgcggataagctttcttcaatttccccgatacctgccagccattttcctttaacgaccgaatgactcggtttgcgtcctgatcaggcatttccagcacttcttttagccgttcctgggcgcgctgaaagatgaccaacacacgcgcttcatcagccatctctatacgaaccgtgtgcgccactacctgtgccgtatacaagacttgttcggtcaagtcggggtagcgccacgcgaattgcgcatcgtcgtagtcatcgaagaccagattgctgcgggttccgtcctcgtagactacaagttctccaaatcgataggagccagcgtagcgttgcatgaatggccgcgaaaatgcctccagcgtacgatcgtaacgcgcccggaaatcaatcgaacttgtgattgtggccgacactggcaagattacgccttcaggcaccgccttatcacggatcaaggtatcgttgatcagaaagcgatggatccgaccattgccgtctcgcatggggtggatatagacaaaagcaaaagcgattacagcggtccgggccagcggctcagcgccccgtgttgccaactcgaatgctttcaagccgtcgagcaattgcattagcacctcaaatggcggcgcaatgtagtgaacgatatcctcgcgcatagtggcctgccccacgaagaccggtgagtgccgcaagcccagccctagcgcctcttcccccaaaataccggcttgcaaggtgtgcaggctttcattactcaacggattctcgatgtgaccacagtacttggcgatcacgtgggcaaaccgctggatcctgtcggctttgtctgcctctctctcgatcaaaaagctggcacgcgactccttgaacgtcagccaactcgccgtgcgcatcaggatatcagcgccaaaggtctggttcagctcccccagtgctgcgcccagatcaaactgcaacgcttcttgcacggcttcggtgcgacggatcaagggggagaacgcaggtacgccgggaagattatcgttgatgcgccagcgccttatacgcaaaggctcaacgcgggtcaggtaatgctgtgatgaaacagcatcgacatagccgccattggtaacatctggtacatcaaggtgcagtccggttaaccactcgtacaggaatccggtgcggcgggcatattgaccaaaaggcgtttgccggcaccaggcttcgacgggctcagggccggctgcagcaaataggcgagcgaagaattcgaggtgaatttcttcgtacttgagcccgaactcgaaatgccctgcaaagtcgtccgagggttggtagctgagggggtacttacgctcgacatgtccattgctctcgtggctcatgcgggtcgtaccgattgccgattcgacgcgcagtggctgtgccagcgagatacggtagcggtcagcgagtgccttgaagcctacctgcatggtcgaatcccctaacgaaccctaaaaaacgataactattagggaatagtaggcgaaaacgataattttgtgagtacgaaaacgctaatgcgctcttaaatttgctaacaaatcagcaatttcatttgaaaacgataacaacctaaagggaagcgatccgaatgaatggggccgtcaggagaccgaggcgatcccttcgaagcctcgctggggctcgacagctcccacagttgatctctgtcgctcggggggacggtgtttggcttgagtgttatgtcgtggctttgaggtccacgcccaaggctgttgcgaaggcttttaccatcgggctgcgcggggcgctgtggcgcaggatcaggttgaacgcggtgctcaggtgaacctgttccgggcacagtgcgcgtaggcgcccttcccttaccaatggcgcggcgtagtgttccggcaggaagccgaggaagcggccggtgaggaccaggatcgcgacagcttccacttgtgaggccgaggcggactggctgtcgtagttgacgaagttggccttgtcgcggtggatcgcataccgatggttcaccacttcgtattggcgcaagacctcgggcgtgaggtcgtttgcgtcgaagagtgggtgtcctacggcacagtaggcgtgggccttttcttcatacagcgggaaataatcgaattcttcacgccgttgatacaccggcacgataccgacgatcagccgcccttcgaccacgccgcgttcaacttcgtccaattgcgaggcatgtaggcgcaatctaattttcggcgattcgctgtgcaatttccctagcgcggtaattagcggggaattaacgtcggacacggtgttatcaattacgcccacactaaggtcgccaataagctcgttttgcgccgaactaagcttgtcgcgaaaactgtctaccgaggtaaataactcgatggacgcctgatacaccaacttgccttcttcggtcaggccaaacccttctcggccccgggtgcacaggcgcatgccgatgcggatctcgaggtcggagatctgtttactgatggccgccaggcccacgttcagctcgttttgcgcggcgctgaagccgccggcttcgactacggccatgaacacgcgcagcaatttgaagtccagcccgctcagttgcaggggcggtcttgtgccgggtttgggtggcaggtttccagaagtggaaagtggggtttccataatacgcgttgacctcaagtgccatattcaacaggcttcaacccaatccttgaacatagccaggcggcgataatgaacataaacatccgcccttggcaaccttgaatacggcgcgtcagacgctggttcagtctagttgaaaacttatttttactgcctccgactcttctaaaaacaagcgtgaggaacatccatgtcccagcccaccgaccgcctttggggcgctcgtttcaagaccggcccatctgctgcattggccgcgttgtcgcgttgccctgagcgctatttccgcctgacgccctacgacctggccggctcccgcgcccatgcccgtgagttgcagcgcgcaggtctgctggatgagtcggagaccctgcgcaccctcgacgcgctggacggtattggtgcggacttcgccgccggcacgctgcatccgaccctggatgacgaggacgtgcacacctttatcgaacgcgtattgactgaacgcctcggcgccctgggcggcaagctgcgtgccgggcgttcgcgtaatgatcaaaccgccaatgacctgcgccttttcctacgcgaccatgcgcgcaccatcaccaccgaggtgttgggtttgcagcaggcgttggtggaacaggccgagcaacatgtggaaagcatctgtcctgggttcacccacttgcagcaggcgcaaccgattgtgttcgcccaccacttgctggctcacgcccagtcgatgttgcgcgatgtgcaacgcctggtggattgggatacgcgtacggcgttgtcgcctttgggggcagcagcgatggccggttcggcgattgcacgccagcctgagcattcggccaaggaaatgggctacaccgggccgtgcgaaaactccatcgacgctgtcgccagccgtgaccatgtggcggagttcctgtttgtggcgggcatgctcggggtgaatatttcgcgcctgtccgaagagttttgcctgtggtcttcgcggcagtttcgctgggtggtgctggacgatgcctacgccactggcagctcgatcatgccgcagaagaagaacccggatattgccgagttggcgcggggcaaggctgggcgcttgattggcaacctgaccgggttgatgtcgacgctcaagtcattgccgctgtcgtacaaccgcgatttgagtgaagacaagcacagcgtgttggacagtgtggacaccttgctgctggtgctgccggcgatggccgggatggttgcgaccatgaaggtgcaggtggaagagcttaggcgtcaggcgccgatggggttcaccttggcaacggaagtggcggattggttggccactcgcggcgtgccgttcaaggaggcgcatgagattaccggcgccttggtgcaggcctgtgagaagcatgagattgaactgtgggaagcctcgccggcgatgttggcggaggtggacgcgcggttgacgccggaggtgcgcgattgcctgaccctggaagcggcgattgcagcgcgcagtgggtggggtgggacggcgccggagcgggttcgggagcagattgggcggttgaaagcggccttggccgaacagcaacagtggacagagagttaccagggatttcggatttaagcctgcaaccccgtggtgtctggtccggcgctttcgcaggcaagccagctcccacattggaccgagtacatcagtaccagcgtcatcagtttttggagagtcaccatgagccaaaccccggccgagcgcttggcagccgagcgcaagttgtccgaaaaccagttcgatatcacccagtacgagcacgtaccgcgtcgatattacgggcggatgttttttgccacgttgatcgtgatcgtgttggccgcgctgttgcgtgccttcgccaacggtcagatcgaatggtcctacatcgggcagttcctcacgtctgaggccatcctctggggcctggtcaacaccatcgtcatgtcgatcctggccatggcgctgggcgtggtgatcggggtgatcacggcaatcatgcgcatgtcggccaacccgatcctgcgctatgtggccatcacctacacttggctgttccgcggcacgccgttgatcctgcaactgctgctgtggttcaacctggcgctgatcttcccggtgatcgcgattccaggcctgttcagtatcgacactgtcgacctgatgacgccgttcgtggccgccctgctgggcctgagtatcaaccagggtgcctacaccgccgaagtggtgcgcgccggtttgctctcggtcgacaccggccagtacgaagccgccaagtccataggcatgccgagcctgcaagcgttgcgtagggtgattctgccgcaggcgatgcgggtgatcattccgcctgtaggcaacgagttcatcagcatggtgaaaatgaccagcctggccagcgtgatccagtactcggagctgctgcacaacgcgcaaaacatctactacgccaacgcccgggtcatggagctgctgattgtggccggcatctggtacctggcggtggtgactgttctttcatttggccaaagccgccttgagcgccgctttgcccgcggcgccggcaagcgttcgtaagtctgggttgaggagatttgccccatgagaagcatcgtcaaggccgtcaacctgaacaagtattacgaccagtatcacgcgctgcgcgatatcaatatcgaggtcgagcaaggcgaagtgatgtgcatcatcggcccgtccggctcgggtaaaagtaccctgctgcgctgcgtcaaccagttggaaaaaatcgataagggcggtctgtgggtcgacggcgaactggtgggttaccgggtcgtcggcaacaagctgcatgagatgaacgaatcgcagattgcccgccagcggttggccaccggcatggtgttccagcgcttcaatttgttcccgcacatgaccgtgttgcaaaacatcatcgaaggcccgtgccaggtgctcaagcgctcgcccaaggaagccaccgaggatgccctggagttgctggcccgcgtcggcctggcggacaaacgcaatgcctatccggtggagttgtccggcggccagcaacaacgcgtggcgattgcccgtgcactggcgatgcgccccaagctgatgctgtttgacgaacccacgtcagccctcgacccggagctggtaggagaagtgctgtcggtgatgcgcgatttggccaccaccggcatgaccatgatcgtggtcacccatgagttgggcttcgcccgcgaagtctccaaccgcatggtgtttatggatgccggccagattgtggaagccggcagccccgaagaaattctaataagcccacaaaacccgcgtacccaaagctttatttctgccgttcgcacttaactaaaaaacaaacgagaacgcccccatgaagaaaatgtttatccccacgttgctcgcaggcctgatggcctcttccgttgttttcgcggcattgccggcggcaatcaaggacaagggtgagatcagcgcggccatcgtgccgaactacccgccgatggacttcaaggacccggccaccaacaagatcaccggcctggatttcgacttgggcaacgccctcgccgagcgcctgggcgtgaagatcaagtggcaggaaaccggcttcgagcagatgctcagtggcctgaccaccaagcgcgtggacatcgtgctgtcgggcatgaccgacaccgccgagcgccaaaaggcggtgacctttatcgactacttcaccagcggcccgcagctgtacaccctggccaagcgtgaagacctcaaggaattgactgacctgtgcggtaaaaaagtcggcaccagccgtcgcaccacctggccgtcggaaattgccgcgtggagcaaggaaaactgcgaagccgccggtaagccggcgatcgtggtgatcggcactgagggctcggcggatgcgcgggcgcagttgcagcagaaccgcctggacgctgcgatgcagggcagcgagaccattccttatttgatgtcgttggacaagggcaagtacaagccggtggggttggcgatttccaagcagttcaccggacttgggattgagaagagcaatacggagttggtcacggcgatcagtgaagcgttgcaaggcatgatcgatgacggcacctacggcaagatcctgaagaagtgggacctggagcaaggtgcggtagagaagatcaccatcaactccggccaataactcgatctgaacaatgtgggagggggcttgctcccaatagcggtctatcagccaagcatctggtgactgagccaccgccatcgggggcaagccccctcccaccctggattttcgttgtccacaaaataacaaggacacccgccccaccgtggccacctactccctggtaatccgccgcctgatgatttgctcgctgaccatcgtggtcagccgcgccatgaccagcccgttgctggccctgttgctgagtacccgcctgggcctgaaccagcaggacatcggcttgctgatgggcatcgcggtgtttatcgcgacattgctgggcctgtacggtggctacatcatcgaccgcctggaaaagcgcaagctgctgatcctggccatgctctccagctccatcggttttctattgctgacctttgccagcaacctctacctcaccaccctgaccctggtcatcaccgaagcggcgtcggcgctgttcctgattggctcaaaagccatcatcagcgagaacctgccggtgggcgagcgtgccaaggtgttttccctgcgctacacactgaccaacgtcggctacgccacaggcccgatggtcggcgtcgtgattgccggccacatgcaactggcaccgttcctgatcgccagtgcgatcgcctttggcagcctgttcctgatgattggcatcccgcccacccaacgggatgacagcaacaagcccttgagtttcctcaccaccctgcgcaccttgcgcaacgaccgcacactgattctgttcaccagcggcagcctgctgagcaccattgtccacgggcgctataccttgtatctgtcgcagtttttgctggtagcctacaaacccgccgaggcgctgaagattctgtctgcggtactggcctgcaatgccatcactgtgattttgatgcagtaccagatcggccgtttcctcaaacgtgagcaactgcgctattggatcgtgctaggtacgttgctgttcatgaccgggcttgtcggtttcagcctcgcagacagcctggtcacctggtgcatggcaatgttcgtgttcacactgggcgagatgatcatctacccctccgagttcctgtttatcgacaccatcgcacctgatgcactgcgcggcagttactacggtgcacagaacctggcggcattcggcggggcaatgagcccggtgatttgcggctatctgctgatcaatgccacgccggccagcatgttctatgcgttgggggcactgactgcggtagggggcaccttgtgtttcttgagtgggcgacgggtagcaggttcttgctgatatttacccaggatcccgctattaatagcgaaacctctcacggacccgagccccatgaaattcgatacggcctacagcctgagtctcgatgacaagctgtcgatctacgacgtacgagacctgaatttcgacgagaccgccgacttcgactccgacaaggaccgtttcctgtgccccaacgatgagtgccgggcagcgtttgatcccggcaataccctgagcaccttcaacgctaaaaacgtcaattacctgcgtacgccgcacttcaagaacaagaccggcacccggcatatcgacggctgccgctacgccagcacgcacaagagcgcagccggcgaaagcgacgacgagcgcgaggacaatttcccatcggaattagtgctcacccgccgtcagtacgagcgcaagaccccgctggcaggctccgaaggaaacatcccacaagagccaacaaagactccctcaaaccgcagctccatttcccacaacgccagcgacaccacaccggacaaaaccagcgtgttcgcccacccggtggaatgctacgtgtccaatatcgacgacaaggacaagctcaagtccatgccgttgaagatcggcgatcacaccgccacctactggacgttcttcaagaagatcgaatacctgcaggacaacaagggcctgatctactggggcaggatcaaagaaatcaaggactacaccagcagctttcgcatcgacttcgaaaagaaggtgtggctcgacaagaagccctactcggtcaatgtctacctgagcaagaaactcatcgagaactaccgcaagcgcaaggcgttcctggagcagatcaaggcggcggtggacagtgagcgggcgttgtactgcttcttctatggggtgacgccggaactgaaacaggtgccgagcaagaaaaaccccgagcagacgttcggggtgttcagcgcgaatatcgagaacctggatcacctgatcattcgggaggcgccgggggtggaatagtgcgcatcagcggcaggacgctttgtatgcccgatagatttcgcgtgtttgttgagccttggcgacacctacgcccccgaaggctaccaaccagtggatcagcatttcctcatcaggaaacacataggtgttttgccctttgaatcctctgggtgttcgattgattcctgcgtcgtagcgcaatggactccaaggctgcgttacaaaatcaaaatcctcggcatcccatttaaagaaccgcagtacttcattaagggtagtctggccactgcgatcgccacgttggacgaggcaataggcttgattagccaacatctgctccagcacctgaggatcgacccaatccagcactgcgcatttcaacgcattatctagaataccggccgtccaacgctcgaaaaacacctggaaaaatcgttcgctatcagcttttttcatatcgaaaaagagcatgcagtaacgggttttaagatgcataaccactaccacatgcttgcgtttaactgtcgcagcatgcaccagccactgatgggggtcgctgtgaagatcatagctctcgacaggcagagcaggccgtagaacgggtgtatgctttttgcctttgtgtactcggctgaaaaactcacaggcagcttgtgagcaattgaacgtcagcattgcagttgctccttcattttacttcccacgccagcaacgaaccgtccaggtttgtgatgaagggatatccacccattcaatgtcataaggttgtcgagcggcatacctaatcgcatccagcgcctctccagtgagaactgccaactcggaatccgtcggcaagtcacgcgtgaccatcacagccaggccactgagtcggttcttcaaatgcagcttttttgtacctgtcatcgccatcgtctggcaaatagactactgccagggcgcaggaaatcgaacaaggccatgtcataaaaaaccagttgatgagcggtcaaaacaactgtacaaaaacacagtatattttgtcctcccccgtcaaaccctggagataccccatgtcctctctggcaatgagctctttcgtagaacagcagatcgtcctgcatcaattcaccgccaagcacagcgtacaggcgcgcgcgatgctgggctggagccgggaacgcctggcacaccaggctggcgtggcggttgaagccgttcagcagtttgaatgtcaatgcgacgtggatgacgaaacccgcctggccctggcctttcggctggaagctgaaggcctggtgtttttcccggggtttgcgccggggtgggggatgagtacacgccgctttgacaccgccacaaccgaacacgcagcgcaagggatcatctctcgcttgatcggcgcaacttcgtcatcacttgactcacccactgctcaagccaatggtgcatagcggccagccgtaccaccttgctggccagcgcctggacggggtcccatgcactcccctctcaaccgcgaaacgtcaggcctgcagttgcaatgcctgacacgtcatttgcggcgtcagagcaccggcttgatttgagcacgggctgcctgctcatacccatgggccacggccagcaaggtgggttcggaccactgggtcccgaaaaaataggcactggttggtagcccattctcatccttacccgcagggacagcgatgcctgggtagccggctgctgctaccccaaaatagtcgttagtctcaaaatccgacaccatggcgtccagaccctccgatttgatcgggtcgtcaatggtagcgcgaaagtctcggatgagctcatcccaaaagggtttgctctgctcaggcgtcatggtttgggcattgatttggttgaggactgtctggtgatccacctccgcgccatcacgtttaatgttgaacagggtcagatcaggcagtgaatcgactggcaaccctgaacgcttgcccacataagtattcaattcattctttacgtccgagaacaacaaatctacccaacgcgaatcatcggccaggcgcatctcgaccggcactacttccgcgccttgctcacgaagcacggcaagtatccggcggaatgacgcactgtccttagtgggtgtgggttcgccagtttcagaaaacgttgcgggatagccgatacgcttgcctttcaacgcgcctggaaccagtaatttcgtgtaatcgataccttggggcgctccctggctcgccggatccttgggatcgctgcccgacatggcattgagcatcagcgccacatcaaataccgaacgcgccatcgggccaggagtgtcctggtggtgacttgcaggaataattccattacggtccagcaagccaacgctgggcttgagcccgacaaccccattgcgcgctgctggcacaataatcgaaccactggtttcagttcccaccgccaagggcgccaaccccgccgcaacggcgacggcagacccggaactggaacccccgacgtcggcatccgcaccatgtgggttacgggtttgtccccccctgctgctccagccatcaggaccaccacgaaaccctgccagttcggtcatattggttttaccgaggatcaccgcgccctgcttgatcaggtagtcgaccaatggggcgttcttgccgacaggtgcccccaccaggccaaaagcacctgcactggtttgcatgccttcagtttcgatggtgtccttgagcaaaacaggaatgccatgcaggaggccacgcacgttgccgctggctcgttcacggtccagttcgcgtgcggtttcaagtgccttggggttgagttcgatgatggacttcagtttcgggtcgaccctgcgaatccgctcatgcaggtacgtgaccaagtcggctgaaccgaacctgccttgggccatttgcgcgccaagctcattgacattgaggtattcggtccccggagggactgcctttgaaacaacaggtgagtggccgtctgcaaaagactgaacaaactgccggacgatggagcccattccatatgcgataccgatcataaaacctctcgaggagtaagaaatgacgaaggaccaacgttgatccgtgggccagtctaaaaactcttctcctgccggacagcgcgacgcgtgcggttcactgtgtgggatagttcaacgcaacgggtagccttccaaggggtccatcaaacgacgggagcttcgatactcgcacaccatggccaccaaccactccttcgcccatcgtgcgccgtagaaccaaagtgtcgcgccatcctcgagcggctcacccagccccgggtaaccactccagcaagccccatggaaggcggtactgcggctgtcggataccaaggcatccagtcgatactcatgcacaagctcatcgatttcattgcgaacatgcagggtgtcgatacggtgcgcatgcaccggtaccagtacggcgccggaccgaagcaggatgtccagcgctttcaggaaggaggtgcggtgctcaatcaactgatgttcatgcccctccacaaaccgctcggcaaatcccaggcgcctgccctgcaacgcactggcggcggtaaaggtcgtgttgttctgcaccaggggcacttccaccatcaccggccccgagggttcaataccactcaatgcgatcaatgacagcgacgggtcacgcgagggttttagagggagtcccggggcgtcataccccgggaccgggacgcttttccccaaggcgccatgagcttggggatcagcaccgaaagcgataccacgcgagcttgtatgctcttgggctatcgttgcctggccagacgaatcagtgagcgcagacacccgctgccctgtcggacaaggcaaccccgcctgccaatatttcttgcacgtgctctccataaaagacgtcccccgacacataaattttcggggatcatcgcaccgttgcctggcgcctgtcgcagctctgaaacagcttgaaaactcctttttccatagcctcctccgtcagcctgcgaggtgttcctgcgcaccctgggcttccacctccagccaccacgcaaccccacgctcaggctgattcaagctgaacgcctgccccatctgcggcgtagtgatggacacgttgcgctcccaggccagggccatgatgcggtcgaacggctcgtgccaggcatggaacgccaggtcgaaagtgccgttgtgaatcggcagcaaccagcggcccttgaggtcgatatgcgcttgcagggtttgctctggctgcatatgcacgtgaggccaatcgacgttgtaagcacctgtttccatcagcgtcagatcgaacggaccgtactgctcgccgatgcgtttaaaaccgtcgaagtaacctgtgtcaccgctgaagaaaattcgccgaggaccatcgatcatcacccaggaacaccacagggtctggttcgcatcaaataggccacgcccggaaaaatgttgcgcaggggtggcgacaaaccgaatgccatccacttcggtgccctgccaccaatccagttggcgtaccttgctggaatccacgccccacttgaccaggatgtcgcccacgcccagcggcgcaagaaaataacggaccttgtcggccaattggacgacagctttgcggtccaggtggtcgtagtggttgtgggaaagaatcaccgcctccaggggcggcaactcttcaaggctgatcggtggctgatggaagcgcttggggccggcccaactgaacggtgaggcgcgctcggcaaataccgggtcggttacccagaatttaccgcgcattttcagcaacacggtggaatgtccaaggcggaacacgctgtgatccggggccgccagcaattgctcgcgagtcagtggttgtaccgggatctgccccaccggccgcgtgctgcgtggtttgttgaacaacatgttccagaaaatgcgcaaggttttgccgaagccaccgtgctgcacgggggtgtcgttgctgaagtgcccttggccttgcttgggcgctgctggcgaagaatcgacgcgggacgagatcgtggccatttccgggtgactcctacggatcgcttataaattacactgcacagtgtagtttcaagattgcaacaaaatccggagcaagtaaactaccgagtgtaattttcctccaagagccgagcgccacccatgactgcacctcaacgcctcaccgaccgtaaacgcgaagccattgtggctgcggccatcgccgaatttcgcgcaaacggtttcgaggtcaccagcatggacaagatcgccgccaccgccggcgtatccaagcgcaccgtgtacaaccacttccccagcaaagaagaactgttcgctgaaattcttcatcaactctgggccagcagcgtcgcccaacttgacgtcagctacaccagcgaccgcccgttgcgcgaacaactgcgcgggctgctggaggcgaagatgaagatgatgtcggacgccaatttcctcgacctcgctcgcgtcgccatcgccgccaccatccattcgccggagcgtgcgcaagacatggtcacccgcctgagccagcgcgaagaaggcttcacccaatgggttcgcgccgcccaggctgacggccggctcaactgctcagaccccgccttcgccgcccaccagatccagagcctgctcaaggccttcgccttctggccacaaatcaccctcggccaacccactctggatgcagcccaccaggccagtgtgatcgagtcggccatcgacctgttcctcgccggctacgaagtcaccgccccccgccaaccgtaaaaaacctgttgtgtgagcgacattccaggtcgtttttgacgcattcgccctccgttttgcgcaaatggcctggaaggacactgattattcccacgcgaataactgacaatattcacagtcattatccgatcaacggttgatccagcgaacgcgcgccaccgtatctgtaaaaaacagctgcccccaggaatttatggaaaacagacaaggcaaagggctttcatttgccaagcgtatctacaaaccaaggatcatcggccttgccatcggttgcatcagtgtcagcggcgccctttaccccctcgccatgccaggctgggtgtgggcactcctgctgttcaacgggtttgcctgggcgcatgtggcgtatcaactgtcgacccgctcgcaatacccctaccaggccgaacaacgcaacctgctgtatgactcgctgctcggcggcttctgggccgctgccacgcagttcacgccactgacggcagtgaccatcctgtcgatgatgaccatgaataacgtggccgccggcggcaagcgcctgttcctgcgtggcctgtgcgcacaagggctcggaatcggcgtagccggggcgctgttcggtatccggttcaaccctgatgtcagcctgctgcaggtctacacctgcctgccgatgctgacgctctatcccatggccatcggcatggtctgctatcaactggcaatcaaactgtccgaacacaagcgcgccctgagcgccctgagccgcaccgacagcctcaccgggctgctcaatcacggttcctggaaggacctgctgcacctcaagttccacaagtgccagcaacagcaaagccacgccaccattgccttgatcgacatcgaccacttcaagcagatcaacgacacccacggccatattgtcggcgatgcggtactgcggcagttgagcctggagttgcggcgcaacctgcgggaaaacgacctggccggacgttacgggggcgatgagttctgtgtgattcttccgcaaatgccgctggaacaggccgcccggatcatggagcgcatgcgcgaaaccttcagcaattaccgcaacccgcagatccccgaattgcgggtcagcctgagcatcggcctggccgacttccaacccttctttagcgatgccgcgatgtggctgaatgcagcggatcgcgcgctgtacgccgccaaggacaccgggcgcaaccgggtcaatgtcagcgacaaagtgatcgcccattccgcctaaagtcgtcctacgactactcgtccgaatcttccagcctgccagccagaagaaagcataatgccaccactggtcgcctacccaaaaaaggtcctccctcaagggcgaacttcctgccaggctgaccactctgaacccgttgtcccaccccctctgtcagcacaaggaagctggcaatgagcaagtcaaccgtagggcatataccttacgggggcaggcgcatatccaaggaaactccagagtctgcttgcccgagcaccgcacatgctattcaacacgcataaaagaacgatcaacaccctgcaacacaccgtcgcccaacaggccagcctgctggacgctatcgagcgctccatggcggtgatcgaattcgacctgtccggcaatgtgctgcgggccaatgccaatttcctccagaccatgggttaccgcgccgagcaggtcgagggccagccccatcgaatgttctgtaccccgggctacacccgcagccctgagtacaaccagctgtggtcaaatctgcgcaatggccactcccagtcaggcacctttgaacgggtagccggcgatggtcagtcggtgtggctggaagccagctacaacccggtgcgtgatgacgcgggccaggtgaccaaagtggtgaagtacgcgatggatgtgaccccgcgcctgcaagccgaaagcgaagccaatgccaaactggacgccatcggtcgtgccatggcggtgatcgagttcaacctcgacggcaccatcatcaccgccaacgccaacttcctgcagcgcatgggttataccctggcgcagatccagggccagcatcaccgaatgttctgcagcgcggcgctggccagcagcccgacctacagcgacttctggaaacgcctgaaccagggagaactgttcagcggccagttcgagcgggtggataaaaacggccaggtcgtgtggctcgaagccaactacaacccggtgtacgacgccagcgggcggctgtgcaaagtggtgaagttcgccacggacatcaccgcccgtgtgcaacagcatgcggcggacgcgcagagtgcggcccaggcctatcacctgtccctgagcacccaggacatggcagagaaaggtgccgaggtgatccagaaaaccgccaatggcatgcgcgaaatttctgcggacatcgacgattcctcacaactgatcgccaagctcggtgatcgctcgcaacagatcactgccatcgttaacaccattcgcggtatcgccgaccagaccaacctgctggccctcaacgccgccatcgaggcagcacgtgcgggcgaacaaggccgtggtttcgccgtggtggccgacgaagtccggcaactggcggcacgcaccagcggctccaccacggagatttccagcatgatcgcgatgattcaggctgaaacccgacaagccatcgacagcatggacgccacccgcgaccgtgctgcccaaggggttgaaatggccaaccaggccggcacggtgatcctgcagattcgccaaggcaccagtgaagcggtgcaggcggtgagtgcgttcgccaacgagcggggcggcaactgacccgatcttcatacggagtgccgggggctcggtctatagtgctggttgttcttcaagcatgagatccgagcccgccatgaccccagaaaagcccgaagccacccccgtcgaccacctgcgcttccaccgcccccacgcccacctggcaccgaccttcggcaacgacacctttgccctcaaggccgaagccttcgcacgcttcttcggtacgccgaccttcctcggcgcacaaaccgccatcgtggtgttgtgggtggtactgaacatgaccggcatcacgcatttcgacgtgtacccgttcatcctgctcaacctggcgttcagcctgcaatcggcctacgccgcgcccctgatcctgctggcccagacccgccaggccgcccgcgacaaggcgcagtccgacgcggatgcgcagcaccgcgaagccctggcgattgccaacaccgagcgccaggcccaggcggcgcagaccaccaagcagttgctggaactgctggaacagaacacccggctcacggaaatgaccaaacaactgactgagcacattgaaagcctgacctgcgaaatgcatgagcactttgtgcgaaaaacctaaggcagtcgcacatgccgtcccagctcatcgaatagggtcaccaccgagcgcaacgctcggcagtccgggcgcgtgagcaaccacaacgcggtgtcatgccctgccaacgcagggcccagcgattgcaggccgtcgcccaatagaaagtccggcaaggccgccacgcccaaaccggcccgtaccagttcggtgaccgataacatgctgttgcagcgataactggggcgcacaccgggcagctgctcgcgacgccaggcgaccgtggggtggtcgggcaggaagtcatccggggcgacccaaggcaggtcggccaactcacggcccgcgtgctgacgggcaaaatccgcgctggcgcacacctgataagccacattgcccaggcgtcgacccaccagatgctccgggggcgtgcgggtcaggcgcagggcgatatccgcgtcacggcggctgaggttggcgaagtcattcgaggtactcagctccagggtcagtgccgggtagtgcggcatgaactgcgccagggccggcaacagcaaaccttgcaacaccgagtcggtacaggtcaggcgcaccgtaccgctgatcacctcaccgccctgctccacaccaatgcgcgctgcttccagggcctgttcggcacgctcggcctgttgcgccaggttgctcgccaggctggtgggcaggtagccggcacggcttttttcaaacaacgtctggcccagcgccgcctccaggcgtcgcaccgcgcggaacaccgtagacacatccacccgcaataacgccgccgcccgtgcgagcgtgccgccacgcaccagggcgaggatcagcgataaatcagggtaatccagtgaatagtgcgtagctgcattgagcatgtgggtaaacgccaatattgattgcgcgaacgccaatctatagtgcgccccaggacaccacaagccatgggatgtacaggatgaaaaccacaccgctgcacctcgccctgatcggcgattacaaccccgctgtcatcgcccaccaagccatccccgtggccgtgcaacaggccgccgaaatcctggggctgagcgtccatgtccagtggctcgacaccgctgccctgccccagtcactccacgctttcgatggtttctggtgcgtccccgccagcccctaccgcgacaccgatggcgcactgcgggcgatccgttttgcccgcgagcaacgccgacctttcctcggcacctgcggcggttttcagcacgcggtgctggaatatgcgcgcaacgtgctgggctggaaggatgccgagcacggcgaactcgcgccgcacgccaagcgcgccgtgatcgcgccactgagctgtgcgctggtggaagccaccgacaccgtgcgcctggtgccgtacacgcgcatcgccgaggcctacgacacccttgatctgcaggagggctatcgttgccgctacggtgtgaaccccgagtttctcgatgccctgctggaaggcaacctgatccccagcggccatgactcggcaggcgatctgcgggccgtggaattgctcgaccacccgttcttcgtcgccacgctgttccaacccgaacgcgctgcgctaaagggtattacgccgcccttggcaattgccttgctcaaggcttgccaggcagtgtcggcatgatcgcccgcacacccgccccgccctactacgcggtgattttcagttcactgcgcaccgagggcgaccagggttacagccaggccgccaaccgcatgctcgaactggcgcgcggacaaccgggatttctcggcgtggaatcagcacgggaagacgggttgggcattaccgtgtcgtattgggacagtgaggcggcgatcctggcctggaagcagcaggccgagcaccgggcggtacgcgaacaggggcgcaccacttggtactcggcgttccagacacgggtgtgcaaagtcgaacgggcgtacgccttcgaaagcggttgagcctttgggttgagagtgcctgatgatgaactggcttgcaggtgatgagcagggttgtttgtggttaacaggcttgttgtggcgagcaggcttgtttgtggcgagcaggcctgctcgccacagggttagctcaccaggctgcgcaacgcactgatctgcggaatctccacccgccgcatatacacccgcaacggctcggtgatgttgatacggtcgtcgatgttctggtccagcagcaactggatgcgctcgcgggacagggtcatggtctgttccggggccggcagccagacgaattcggcagtgggaatgatgccgtcatcggccacgtccatgccgaaggagtcttcgctgaaacgcacgatgtactggccggtcttgcggttgaggccaacaaacccgtggagttggtcggcggcctggcagataagctcggaggtgatgcgcatggtaaacctcactgaaaagtcccacagggactggaaagatggtttacacgcgtggcacaaagtaccgccctctaacggagcagcttcgggcaagagtactgcaatgcctgcaaaaaaaactcagaaaattgaggcgtgagcacgttaatgtcggtttggtgatagcgcctttcgcaatcaattgttaaaaaggaggccttctcaaagctacctccacgaaaggacttcgcatatgcctgtcacgtttaccaagagtgccttgctgctcgccctgatgctcggccttggccaggcacaggctgccgacccgatcagcccggctgaattggcaaccaacgaaggcattccgtaccccgccgtgatcgcccaccgtggcgcttcctacgacgctcccgaatccaccgccgcggcctacaaaattgcccgcgacctgggtgccgactacctggaaatggacctgcagcgcagcaaggacggcgtgctgttcgccctgcacgacaacaacctgcagcgcaccaccgacgtggctaccaagttccccgaccgcaaggacgccccggccaacgagttcacctggaaagagctgcaaaccctcgacgccggcagctggttcaacgccgcctacccggatcgcgcgcgtccaggtttcgttggcctgaaaatccagagcctggacgacatcatcaagatcgccgaaggcaacccgcagcacaaacccggcctgtacatcgaaaccaaggagcccaagcaattcccgggcatcgaagccgacctgaaaaacaagctgctggacaaaggctggctgagctccgccggttccaaactgggcaagagcaacaccggtgtcggccagggcaagggccgcgtcgtgctgcaaactttcgaggttgccagcctcaaagagctgcagaaagaaatgcccaacaccccgaagatcctgctgttgtgggtgggtgaaggcagcatcgagccgaaaaacaagcagacgttcgctgagtccggcgaaaccaccaaggccgcctactacgccaagcaggaaccgaaggatgccgccgagttcgaaaaatgggtcgacgaagccaagagcctcggcgccatcggcaccggcccatcggctgagctgaccaaccacggcgaccagagctattcggacctggtcaaaccggaaatgaacaaactgacccacgacaagggcctgctggtgcacgtctacaccgtcgatgagccggtggacttcgacaaagtgatgaaggccggcgtcgatggcatcttcaccaaccgcgccgccgaactgctgaagttctacaagcgctggccgtcgtccagcgtgcaggatctgctgaacgactataagtactgagtggtcagtgtgccattaaggatgagttaagttgcgccggttaatctggcgccacttaaacagctcaccgaagaaggacacacaccatgaaaaccttgaccgctctgttcgccgctaccgccctgaccctgaccgccggcctggcccaggcggatgttcgcccggaccacattgaaggcctgctcaagtccggcgccgtgatgcctttcgaaaaactcaacgcggctgccctggccaaacatgcaggcgccaccatcaatgacaccgagctggaccacaacaacagtggtgtgctggtctacgaagtcgaactgaccgacaccgctggcaagaagtttgaagtgaagctcgacgccaagactggcgccgtgctggaagacaagctcgatacttgatttgaactaaaaaaaagccacccttgggtggcttttttttgcctgatcaggcgctaagacgcgccgtcacctcattcaactcactcgacaacccacgcaggtcatggctcgccgcttcggtgcgcttcacgttgtcgaggttggccgtcgccaccgtggtgatctgcgtgatgttgcgcgagatgtcctcggccaccgaagtctgctcctccgcggccgtggcaatctgacggttcatgtcgcgaatcgcctccaccgcctgagtgatgtgagccagcatggcgccggcttgcgtgaccttctccacactctcatcgctgcacgactggccgctcacaatcgcttcagccgcgtccaccgcaccggtctgcaccgcctcgataatcccgttgatctcgatgatcgacgccgccgtgcgttgcgccaggctgcgcacctcatcagccaccaccgcaaagccccgtcctgcttcgcctgcgcgcgcggcctcaatcgccgcgttgagcgccagcaaattggtctgctcggcgatgccgcgaatcacttccagcactttgccgatgcgtacgctgtcggtttccaggcggcggatgatcgtgccggtgttgaggatttcgttgcgcatctggccgatggtggcgatggtgactctcatcacctcaccgccttcgcgggccgaatggtccgcctcgtcggccgcacgggaagcactggcggcatgacgcgcgacttcctgggcggtggcggacatttcggtcatggccgtggccacttggtcggtgcggttgaattgatcgtgggtgcccgtggccatctgcccggcgatggcgttcaactcgccgctggcgccgaccaggtcgctggcgctgcgctgcaagcggctgaaggtttcggcaagaaagtcgcgcaaggtatttgcggcggcggccaagtgacccaactcatcctggcgacggctggctacgcgctcggcgaaccgaccgtggctcagttgcgtcacgtagtcgatcaggctgcggatcggcaggatcaggttgcggttgatcaaccacaggctgaacaagccgatcagcacaccggacagcaacatgatcgccaaccccaccagcacggtgcgctcagcgtaggcgctgatggccttggattgctggctgccttgttcgcgcaggtcactgaccagcgcactcatttgctcgctggccgcgcggtccacgcccttcaccgccatatcgcccgcagtggcatcgccccccgccgccacgtaggcatcgcggcctttctggtaagccacaccgagttgctcgtgcgtctgacgcagggtttcgatgcgtcggctcaggctcgggtcgctgccggtctgggtgaccagccgagtgagaatgccctgcacatcgcgctgacgctcctggaactggccccagtatttctccatgtcctgaggctgcttgccgcgcaacaggacgtttttccattcctgcacctgcaccttgaattgcaggttggcctcgtcgatcaactgtgaggtcagcaacggcccatcgatcaaacttcgatagctcagcaccccattggacaggaagttgaaacaggccagggcgatcaacagcatcgccaacaggctgccaccgagcagcgacaggatttgtgctctcaaggaggttcgcaaaacattcatcggggaaaagcctcgatacaaggaagtggtgcatacacacggcgacttccctgtcatcaaaagcaccgccgatccacagcggttcttaacaccttgaatcggccgggccagaggcctcttgaacaactcctgacaggcggtcaaataaatgtcaccgcaacgaaataaatccaaaaccgtcacaaaactgtcaaattcccttgcaatgattcgcgcatgcgaacctgtgaaatctcctacaggcgcttttcctgcgagccctcatgaaccacagcatcgaccacagccaccaggactccgacctgttcggcttgctttacggtttccgttttcgccccggtgaaaagggcgagcagatcgattcggccacggccctccaggccttgcgccaaccggccgacccggacgagtttttgtggttgcacctgaacctggctcacgccgcgtgcgagcgctggatgcaggcgcatctggacctgccggaagagttcttcgaagccctgcatgaaggctcgcgctccacgcgcatcgagcatgtcgactcggccctgctggcggtggtcaacgacgtggtcttcaacttcagcagcatggtctcgtcggatatttccacgctatgggtgtgtgcgcgcagtcgcctgctgatcagcgcgcgcctgcaaccgctgcactcggtggacaagctgcgctcatcggtgaaggccggtgaaagctttcgctcgccactggccttgctcgtgcacctgctgcgtgaccagggtgaagtgctgacgcagatcgtgcgcaagaccagcatcagcgtcgaccatatcgaggatcaattactctcttcgcgcctgtccaccaaccgcgccgaactgggcgcggcgcgccgggtgctggtgcgcttgcaacgcctgctggcactggaaccgggctcgctgctacgcctgctcaaccgcccgccgcaatggctgcaaaaggaagacgtgaaggagttgcgcaaatccaccgaagagtttgcgctgatcatcaacgacctgatggccctgggcgaacgcatcaagctgttgcaggaagagatcgccgccaacctcaacgagcaaagcaaccgcacgctgtttaccctcaccgtggtgacggtgctggcgttgccgatcaacatcatcgccggttttttcggcatgaacgtgggcggtgtgccactttcccaagacccggaaggcttctggatattggtggcgttggtggcgacctttaccttgatcgccgggcggtgggccttcaggaagcgcaaagactactgagctgcaacaccgttgaacatgtgggagggggcttgcccccgatggcagtgggtcagctacagattagcttgctgacccaccgtcatcggggggcaagccccctcccacataggttctgcagcgtatacaggatcagcggctatcccaattccatcaaacactgacctatggcagcatctctgtaacattctgcaatgactatgaacgacatcctccccacactggatgccccggcatggccaccccttccctgactgcctccacccacgcctcacccgctgcccccaaacccaggctggacaagaaacccagcctggtgacggtgatcatcttctttgccgtgctcgccatgggcctgttgttcaccgcctacagcctgatgcacgacatgcacgaaatgggcgcccagctcaccacctggacgccatttttgctgctgggcgtggcgctgttgatcgccctgggtttcgagttcgtcaacggcttccacgacacagccaacgccgtggcgacggtgatctacaccaactcgctgccgccgcattttgcggtggtgtggtcgggctttttcaactttcttggcgtgctgctctccagcggcgcggtggcgttcggcatcattgcgttgctaccggtcgagttgattttgcaggtgggttcgtcggccggtttcgcgatgatcttcgccctgctgatcgccgcgatcctgtggaaccttggcacctggtggctgggcttgccggcgtcgtcgtcccacacgctgatcggttcgatcatcggcgtgggcgtggcgaatgccttgatgcacgggcgtgacggcaccagcggtgtggactggagccaggcgatcaagattggctacgccttgctgctgtcgccgctgatcggctttgcctttgcggcgatgctgttgctggccctgcgcgccttcgtcaagaaccgcgcgctgtacaaggcgccaaaaggcgataccccgccgccgtggtggatccgcggcatgctgatcgccacctgcaccggcgtgtcctttgcccacggctccaacgatgggcaaaaaggcatgggcctgatcatgctgatcctggtgggcaccttgccgatggcctacgcactgaaccgcaccatgccggctgagcagtcattgcagttcgccgccgtagccgaagtcacccaagtcgccctggtgaaaagtgcaccgcaagcattgaccggtgacccacgaccgatcctctccacttacgtgcgcaccaaggaagccaccccgcaactcgtccccgccctcgcagccctggccgggcagatcggtgatgaggtgaaaggctacggttccctggccaaagtgcctgccgaagccgtcggcaacgtgcgcaacgacatgtacctgaccagcgaaaccattcgcctgatggacaagggcaaggtcggcaacttcgacgccgacacccaaggcaagctgcaactgttcaagcaacagatcgacaattccacgcgcttcattccgctgtgggtgaagatcgccgtggccatcgcactcggcctgggcaccatggtcggctggaagcgcatcgtggtgaccgtgggcgagaagatcggcaagacccacctgacctacgcccagggcgcctcggcggaaatggtagcgatgctgaccatcggcgcggccgatatgtatgggttgccggtgtcgaccacccatgtgttgtcgtcgggtgtggcggggaccatggtggcaaacgggggcgggttgcagatgcgcacgatccgcaatctggcgatggcgtgggtgctgacgttgccggcggccatcgtgctttcaggtagcttgtactggctgttcacccaactcttctgacacaacagtgattgaacatgtgggagggggcttgcccccgattgcagtgggtcagctatagataagctggctggtccaccgctatcgggggcaagccccctcccacagttttatcctgcgaacagcccggacatcagcttcaaccgcttcttgtacacccgccgcgcctccaacgcctcttccagcgtcactgccacaaaccccgcccgctggttcggttgcatctgcccgatcaaatccaggtcggcactgatcaccgtgccgatcatcgcgtagccaccacccgacaccgcgtcccggtgcaacacaatcggctccaacccggccggcacctggatcgaaccaatcgggtagcaactgtcgacgatgttcgacggatccgaccccgcgccaaacggctgctcccgtggctggaagctcaacgcactgccgcccttgaagcgatagccgatgcggtcggcttcggaacccacggtccagggctcggcgaaaaagctgctttttgccacgtccgtcaggcgctcgtaatacagccccggcaccacgcgcagggtgacatccccgcccaccgaacggcgcaacgccatcggcaaactgttgcccgcacgccccgtgccactggcttcaccgatgggcaactcgtcgccttcctgcaagcgccgaccgtgaaagccgcccagcgcgccgagggtgtaggtggcgcggctaccgagcaccagcggcacatcgatgccaccggccaccgcgaggtaagtccgcgcccccgccttgggaaactcaaagcgcaacacctgcccggcacgcacctgaaacgccgtgtcttggtgcaccacttcaccgtccaggcgcggcgacatcaaggcaccactgagggccaccagcgcatcctgttggaattccagttcggggccgatcagcgtgcactccaggcccgctgcgcccaccgggttgcccaccagatggttggccgcgctcagcgcgtattgatccagcgcgcccgacggcgggatacccaggtggtagtaaccttcgcggccaaggtcctgcacggaggtggcgaggccgggtttgaggaccttgatcatgccagcgcctcctgcagggttttcggatagccaatggggtcggcgagaaaagcgtcgagggagaattccaccgggcggatgcgcaggtcgaaacgtcctgcgtccacctcggccaccgcctgatcgtaggcgtcgcggtccatgggtttgaactgcacgatatcgccggggcggaagaacaccatgtgctccttgaggtaggccaactgctgcgccgggtcatagatcggcgccggggtcacgccgaacatctggtaaccgccggcaccgcgcaccgagtaaatgcaaccaaagcagccgccatggccgagggtgagtttcggcgtatcggtgcgtgggcgcaggtacttgggcacttgcaattggcgctcgcgctcgaccatctggaacatgaacggcaagcccgcgacaaacccgaccatcgacacaaaccacggcgcaccactgtgggctgcgataaacgcgtcgacatcagccaggccattgatgcgtgcggcgtactccaggtcggtgccgctggggtcctggtggcggtcgcgaaagcgcatcagcgtttcgtgcgtccacgggtcgttgtacagcaccgggatttcgatgatgcgcgtgtgcagggtgcgttcggccacggcctgggcttcggcggtctgcaccgcatcgagcaatacgtgaggggcaatgcggtcggggtcaaagcgaatctggaacgatgcattggccaggcacacatccagcacgccttccagcgccaggcgttccacggcgcgggtcaccgccatgcctttgaaaaaggcctccagggacatgctgtcgctgacctcggcaaacaggtgttcatcaccgccaaatctgtagcggatgggggacgtttcagccatgtctgttcctcttggaatcgttgtagaaaggcaggcgaaaaataaggcgatgatttcttattgtggtgttttgaccgtgatgcccgcttggtccagcgcttcgcgggtggcttccaccagttccagggcacccggcgtgtcgctgtgcaggcagatggaatcgaattcgataaacaggtcttcaccttccacggtgcgcacaagccccgtctgacaggcccgcaggacgcgtgccgccactgttgcaggatccagcgcccgcacattgcgggtaaacacgatggagccggtcagatcgtactcacggtcggcatagaactcccgcacaaccggctgccccagttccgtggccgcacgccagatcaccgaattgggcatgcagtacagcagcaaggtcggctcgatgatttgcaggttctgcaccagcagccgcgcagcttcttcgtcgcgggccaggtgcatatacagcgcgccgtggggcttgatgtgttgcagggtcacgccctgggcgcgggcgatttcccgcagggcgccgagttggtagagcatgtcgtccaccagctcttgagccggggcgttgatgtggcgacggccaaagccgaccaggtcgcggaagcccggatgcgcgccgatggccacgcccaattgtttggcccgctcgacggtgcgacgcatggtgccggggtcgccggcgtggaagccggtggcgatgttggccgagctgatataggccatcagttccgcgtcgacgccatcgccgatggtccaggggccaaagccttcgcccatgtccgagttgaaatccactgcctgcatcgaagtcgctccgcctaagtgatagaggaaaagtaggctgcggcttgaccccttgggaagatctattatcagatgacccatcttctgaaaatcagatagccctatgttatggagaggccgatgtccctgaccttgcgccaaattcgttatttcgtcgccaccgccgagatcggccagatttcccaggcggccatccacctgaacatatcccaatcggcggtgactacggcgatcaaggagctggagggcatgctcggcgtgcagttattcgtgcgctcggcccagggcatgaacctcacggatgccgggcggcattttctcaaccgtgcctacgtgatcctgcgcagtgtcgatgacgcgctgaacagcccgctgcccgactaccgcgccagtggcgtgctgcgcctggccgccagctacacggtactcggctacttcctgccgcaccatttgcagcgcatggagcactggcacccggacgtgaccatcgaggtcttcgagcaggagcgccaggccatcgaacagggcttgctcgatggccagttcgacatggcggtggtgctcaccgccaacctcactcacccggccatcgtttcggaaatcctcttcaattcggaacgccgcctgtggctgcccagccaccacccgctgtgcgaacgcggcgccgtgagcctggccgacgtggcccgcgaaccctacatcctgctcaccgtcgacgaggccgaacacagcgccatgcgctattgggaacaggccgggcaaacgcccctggtgcggctgcgcaccagttcggtggaagcggtgcgcagcatggtcgccaatggcagcggcgtggcgatcctgtccgacctggtgcatcgaccctggtccctggaaggcaagcgtatcgaaaccctcaccgtcaccgaccccgtcacgccgatgagtgtgggcctggcctggcaccgcgagcgcgccttcaccccggcgatgcaggcggtgcgcaattacttccacgacgcgttcctggcgccgcagcaactctcggcacggcgttagaggtgggcttgcagggtggcggccaaccagtccatgaacacccgcacccgcaacggcaaatgccgctggccggcgtacagcagtgacacgtccagcggcggcgccgggtagtccggcagcagcgcgaccagctcaccgctggccaataaatcaccgatacccagggccggcacctgggtaatcccgaacccccccaggcatgccgccttgtaggcatcggtgctgttgaccgtcacgcgcccggccatgggaacgcggtgcaccttgttgcccagcaggtattcaaagccagccgaacgcgcgcccagcggccgcacgtaatgcaccaactggtgccgcgccaggtcggccaatgtctcgggcatgccatggcgttgcaggtacgccgcgctcgcgcagttgatcatcggcatgctgcacagcaggcgcgccaccacgctttggtccggttgcgcaccgacgcgcagcacgcaatcaaagccttcggcgagcaggtcgacctggcggtcggtggtgctgatctccagctcgatcagggggtgagcatgcatgaattcgggcaggcgcggcaggatcaattcccgcgccatcacgttgggcatgtccacccgaatgcgcccgctcagttgcgcttcatcctggcgaaacaagccttccaactcttccatgtgcgacaacaggtccttgctgcgctcatacaaaacccggccgtcctgggtcgcctgcaccttgcgtgtggtgcgttgtaacaggcgcgtgccgagcagctcttccaaggcttgcacatgctcggacacagtcgagcgcggcaggccaaggctgtcgccggcctgggtaaaactcgacagttcggtgacacgcacgaaggtgcgcagcagctcaagtttgttcatttgattgttcgcctaatccgaccagttattccggtataacgctgtttatcacgttatgggcgaataaatacactgggttccactgatcacccacgaggactagaccatgacccgtaaaatcgcactcatcaccggcgccagccgtggcctgggcaaaagcgccgcgctgcacctggcggcacagggcgttgacatcatcggcacctaccacagcgcggcggctgaagcccaagcggtggtcgcacaggtccaggccctggggggccgcgccgccatgctgcaactggatgtgagccagagcggcacctttgatgattttgtcggcgaagtcggcaccgtgctcaaagacgtattcgcacaggaccacttcaattttctgatcaacaacgccggcatcggtgcccacgccagctttgccgagaccaccgaagcgcagttcgaccaattggtggcgatccaattcaaaggcccgtttttcctaacccagaagctgttgccactgatcaacgacggtggtcgtatcctcaatatctccagcggcctggcgcgtttcagcctgccgggctatgcggcgtatgcgtcgatgaaaggtgcgatggaagtgctgacccgctatcaggccaaggaattgggcggtcgtgggatcaccgtgaacatcctcgcgcccggcgccatcgaaactgatttcggcggcggcgccgtgcgcgacaatgcggcgctcaatacgatggtcgccaacaacaccgctctaggccgggcaggcttaccggacgatatcggcggcgccatcgccgtcctgctggccgacggtagcaactggatcacggggcagcgcatcgaggcgtcgggcggcatgtttctgtaaaaacgtgtcgcgcagtacgtcatagccccagtgatagacataggtgtacggcaggaaaaacagcagtacaccgatgtcgagcatgaacgcctgcatcaggctgatgttcagccacgccgcgatcaacggcacggcgacgatgatcagcccgccttcgaacatcagcgcatgcagcacccgcgtccaaccaccgttggacagttgcaggcgcaccttgagacggtcgaacaggctgttgaagatgatgttccaggtcagcgccagcaggctcaggcccagggtcaccgcacccatttccagggccggtctgccagtgatccataccagcagcggcgtacagatcaacagcgccaggccttcaaaacccagggcttggcatacacgttcagtaatcgacttggtagggctcataacctgtgctctgtgaaggacgatggttgccatgattaccctttgaatcgatacttcataactaataaccatcgatcaaggcgatagtcatggcctcccacgaagtgctgcaagcgtttgtccaggccgccacccaagggtcgttttcggcggcggcacgcaagctgggcaagagccagtccaccgtcagcgcggccgtggcgagcctggaaattgacctggatgtgctgctattcgaccgcagcagccgcaagccgacgctgactccggccggccatgtgctgctgcaacgcgccgagcaggtgctggaggccagcagccgtttggaattggcagcgagccagttatcccaggggttggagccgaaactgaccatcgccatgtcggatacctaccaatccgatcgtttcgagatcgccctcaaagcctttgagcagcgctacccggaccttgaactggaatgcctgatcgccgaatgtgaagacttgatcgcccttgtgcaaagtgggcgtgcgcatatcgcatttatcgaaaagcaggaggtctacccacccgacctgacgggcgctccggtggaagaacgcacggaaatcgcgctgttcgtcgcgccgacacacccactggcacacctgcgcaacatctcgaccgacacgctgcaacaacaccgcgaattgcgcctggccagcattatcaacccgactgaaacccgcccaaccggccgggtatggtcggcacccagttatttgatgctgatggaaatggcgcaactgggcttcggctgggcgccgatcccgcgctggctggtggagcgttttggcggcgaccatctggtcgaactcaaagcccgcagttggccacgctcggtggccgtggatgcgctgtggtcacggcaccacccgccagggccggcggggagttggttgctcggcaagatgctcgagtaactctccaccaggaccagctctttcaaagtctttgaagagccagccatatctggctaataccattccattaaaggcgaacactgcaactgtggcgagcgggcttgtcccgcgttgggttgcgaagcgaccctgggaggaggaatgcagtgcgtcaggcaatcttcggccgctggtgttggggccgcttcgcagcccaacgcgggacaagcccgctcgccacagggtgttaatcgccagttctacctaaagaccttgaaagggctgaccttaaggacgccatcgtcggcaagccgggctcctacaaagtcaggcggcctgaacctgcggcgggcggttgttctggaagtattcgtgcagggcactcaatgcgggcagcgccaatgtttgcgcggcgacgcgtcagcagccttgattcagagttcgaccagacgcttttcgataaacctgcgttcgggcgcctgctgggtcaaggccagcgcccgctcgtaggctgcgcgtgcctctgcgacgcgccccagttgccggcagaattccccccgcgccgaatgcgccaagtggtaatccagcaactcgccacgcgccagaatcccctccacctgctgcaagccctccaacggtccatcgcgcatggccagcgctacggcgcggttcagttcgatcaccggtgacggcgttgccctgagcaatacatcgtagagaccgacgatctgcggccagtccgtctcatcggcacgcgtcgcttcggcatgcaccgctgcgatggcggcctgcaggcaatacgggccaaagcgccgggtgcccagtgcgcgctccaccaacccacagccttcggcaatcaacgacgcgtcccacagcgagcgatcctgttcatccagcagcaccaactcaccctcggccgaggtgcgcgccgggcggcgggactcgtgcaacagcatcaacgccagcaaacccatgacctccggctcgggcagcaactccagcagcaggcgccccaggcgaatcgcttcgcgggtcaactcctcgcgggtcaggtcggccccgacggacgccgaatacccttcgttgaacaccaggtaaatcacccgcagcaccgcgtccaaacgctccggcagcgcgtccctggacggcacctgataagggattttcgcctcacggatcttgcccttggcgcgcacgatgcgctgggcgatggtggccggcgtggccaggaacgcccgggcgatttcctcggtggtgaggtcgcagatctcacgcaaggtcagcgccgcctgggcatccgccgccagcgccgggtggcagcaggtgaagatcaggcgcaggcggtcgtcttccacgtcttcatcgctccagtcagccgcttccagcgtgtcggcctgctcctgcaacaacggggtaaaacgcgcctgacggcgcagacggtcgatggccttgaagcgcccggtcgacaccagccaggcccgtggattggccggcacaccgtccagcggccagcgctgcacggcgacgaaaaacgcctcgtgcagggcttcctcggccaggtcgaagtcgcccagcaagcgaatcaacgtggcgagcacccgacgtgattcgctgcggtaaagggcatcgaccgagagggtcaatcgtgcataccctcggtcaccagcgtgaccagccgatccaggctctggccccagccatcgtgaaagcccatggcttcgtgggcctgtttgtcttcggcgctccagtgcatggcccgggcggtgtagagcgtcttgccatcgacctcgtcaaaggtgacttcagcagtcatgaacggcttgcccgagggtatccagcccggcatgaaggcatcggtaaacaccaggcgactgggcgcaacgatttccaggaacacgccctgggtcgggtattcggcaccgtccggcgcacgcatcagggtacgaaacaggccaccgacccacaggttcatttcgcactcgggggtggtcatgccgtgggggccccaccattgctggagcaaggcgggttcggtccaggcgcggaacacccggctgcgcggtgcatcgatcaggcggctgatggacagttcaaactcggcaggttgcgtagacatggggtaaacctcttgagtcttatggttgttgtgttcagagattcaattcacgcacggggcgcacttccacactgccgacccgggccgccggaataccaccggccacctggatcgcttcgttcaagtcgcgggcctcgatcaggtagaacccggcgagctgctccttggtttcggcaaacggcccgtcggtgatcgacagcttgccattgcgcatgcgcacggtggtggcagtgctcaccgactccaacggctcggcagccagcatgcgaccgctggcctgtacggactgcgcgtaggcgaagcattccgggtctgccgggctgtccggcgaggtgtgcaatacctgttcgttgctgtagatcaggcagaggtatttcatggatttctccgttttcggactactgactatagttcgcggcgctcacggtttcaggtcgaacagaccggtgccggtttccatgtcaaaaggcgcggaccagtgctcatgcaccaccttccactgcccgttgatgcgctggtaaccggcgctgacccgcatccagcatgtcttgagcacgccatccggcccggcgccaccacagtgggcgagccagtgggcaaaggcgctgtcttctccggcaacgatatgcagctcatgaaagtcgaaaataccggggccggggcaaaactccatgcaggccttccagtgcgcctggtaggcagccttgcctttgaattgcagggcgccaacggcgtcgaacgcgacgatatcatcggcgtaaaagctgacaatcttgtcgacatccttggccgtgacggcgtatttccattgttcgatcagggtgttgattgcagtgctcatggcgatactcctcggggtcgaaaactcacggaagacacccctagtcgaatggcccttcggcaaatcgacaacccgcttaaaaataatttcgccctcggcaaacccgctagaatccacgcctctttgtaggatttcggatgcaccaccgatggaaacccgcctcgttgcctatgagacgctgagccttgcgcagaaacagcaactcgacaccctgcaagtgcatcccgagcaactgccgtattccggcgatatctactgtgcgctgaacagcctgctggtcaaccccagccccggcgccatcaagggcttcgccctcctcgccgacgaaataccggtggccttcctgctgctcaaacgcccaccatgcctgccccattgggccgatgaacatagcgcgaccttgcatgcgttgcaggtggaccggcatcaacaagggcgcgggttcggcaaggcgtgcttgcaggcgctgccggcggcggcactggctgcgtggccgcagatcaagggcctggagttgtcggtggacgcggacaatgtggcggcgatggggttgtatctgagggctgggtggctggacagcggggaggcgtataaggggcggattgggtatgagcggaggttgaggtgggtgtttggtcaggccaaccttgacacgctcaaaatgtaacgtatacataacttaacaaaagctaagtaataaatacgtgacatggatacttctgtaatcactcatcgactcggcatccaactacgttccctgcgcctcaaccgtggctataagcaggccgatttggcgaaactggccggagttacccgacaaaaactgatcgaaatcgagaaaggcagcctctcggtctcgatgaatgcctatgcccgggtgactgcagcactgggcagcgaattcaaattagtgcctgtgaccctgccgacccttgaggaagtggaggatctatttaatgactaatcccaggttgcgtgttcacacacctcaaggtgatagcggcagcgtattgatgggtgccgatgactatctgtttcgctacggcgataacacgcaagcgcatagcgcagtcagcctgttgatgccggttcgcacagaagaatatcgccgccgagaactccaccccatcttccagatgaacctgccggaaggctacgtcctggagcaactgcgcaatcggctcgccaaaacggtcagagtcgacccgatgttgctgttggcactctcgggcagtagcgcgccgatcggccgggttttcgtgtcttcggatcaagtaaatgagctgatccatcgcaacagctctccggcaaccggagaaagtcttgacgaaattctcgcctgggatggcgcagaagacctgttcgtcgaactggtggatcgctacatcctgcgagcaggcatttctggcgtgcagcccaaggtgctggtgccggaaaagccgctgacacccgaacagaaattcacctcgaaaaccaacgacctgattatcaagagcgggcgcgacgagtttccggggttggccatcaatgaatacctgtgcatgtccattgcccgcgatgcaggtctgcccgtgccgccgttttacctgtcacaaaaccataagctgttcatcatgcggcgctttgatcgggacgaacacctcaacccactgggttttgaggacatgactacactgatgggcctgtccgccgaacaaaagtacaccaagagttacgccgccatcgccaaggccgtacgtgtgttctgtgccccggcctatcaacgcagctcactcgatcaattgtttgatagcgtggcgctgagctgcatcgtggctaacggcgatgcgcacctgaaaaacttcggcgtgctctatagcgaccccgtgcaatcggatacacgtttggcgcctgcttacgacatcgtcaacaccactgcttacattcctgaagacacattggcgctggacctgagtggaaacaaatcgctgttcgcctcacgcctgggcatcctcgaatttgccagaacctgcgaaatagaaaatcccgaaatgcgcatccaggcgctcctgcagacgcttgaagtcgtgctcaagcgcgaagacgattactgtcgattagcgcctgaggtcgcgaaagccattcggcgatccgctcagggttaccaacacagctttggcggctgaacacgcgcccgtattcatccaaggacaaggtgactctcatgctgacaactctcgaacaactcgaaaccctctacggcctcccccacgagcgcgccgtacgcaaggaaatcccgtttctcaatgaggactaccaggcgatggtgcgggcttcaccgctggtggtggtgagttcgtccgggccggacggcatcgacggttcgccacgcggggatgtgccggggttcgtgcggatcgtggatgagcgcaccctggcgattccggatcggccgggaaacaaccgcctggataccttgcgcaacctggtgcaggacccgcgcattgcgttgctgttcatcatccccgggatcggtgagacgttgcgggtgaatgggcgggcgcagatttgcattgagccgcaactgctggagagttttgcggtgaatggcaagccggcgcgctcggtgattctggtgcaggtggaagccgcgtatttccactgctccaaggcgtttgtccgctcggactgctggaacccggagaaacacctggaccgttcggcgctgccctcggcgggagcgtttcacaagcggctcaatgatgggcagtttgacgccgaggcgtatgaccgggagatgccggagcgggtcagaaccacgctgtactgatacctctgtatgagccggcttgccggctcatacacgggcaatcagcctctttctcccaccggcaaccagatctccaccgtcccggtgcccttgcgcccgtcaaaatccgcgctgtagcgctcgaaatccgcgcccatcaccttgtagcccgagtgcggcagccactcgaacatgatgcgttcgtaggtttgctccagcgcctgcaccggcccgtaatgcgggaacacggcatagttgagtggcggaatttccacgcattcaaagttgctcggcacgtcacccttggtggggacttcgaccccggccatgtagtcgaattcgccatggttggggttatggcaaacgccataggtcacaccgccgacgcgcttcttgatgtccttgatgcaggtgtcgaacaactcccacagcttagggatatcgcccacggtggccttcgaataacgcccttgtacaccggcaatcaccagggccttgcccgcttccatgcgtggctccaacggttgttttgtctgctgatccatacgaacagtctccttcttatgagggaacaaacccgtatcgagtataggggcatatccacgcggtactccatgcagaaaatttcctacacatctggacaactggccatcatcgaccgtattgtctgccccgcaggccaccgcagtggccgacgtcgctcggacggttccgggcgcttacgtactctcgaggcaacaatggccgaccaaggttcgccgcgccgctttgcgcgcatagatcgactccccccgtatgttttcaatatcactgccgagctgaagatggctgcgcgtcggcgcggcgaagacatcatcgacttgagcatgggtaaccccgacggcgccacgcctccccacatcgtggagaagatggtcaccgtcgcccagcgtgaagacacccacggctactccacctccaaaggcattccgcgtctgcgccgggcgatttcgcgctggtacaaggaccgctatgaagtggacatcgaccccgagtcggaagccatcgtcaccattggttccaaggaaggcctggcgcacttgatgctggccaccctggaccagggcgacaccgtgctggtgcccaacccgagctacccgattcacatctacggcgcggtaattgccggcgcgcaggtgcgttcggtgccgctggtgcctggcgtggacttcttcgctgagctggaacgggcgattcgcggctcgatccccaagccgaagatgatgatcctcggtttcccgtccaaccctaccgcgcagtgtgtggagctggacttcttcgaacgcgtgatcgccctggccaagcagtacgacgtgctggtggtgcatgacctggcctacgccgacatcgtctacgacggctggaaagccccgtcgatcatgcaggtgccgggcgccaaggacattgcggtggagtttttcaccctgtccaagagctacaacatggccggctggcgcatcggcttcatggtgggcaacccggaactggtcaacgccctggcgcggatcaagagctaccacgactacggcaccttcaccccgctgcaggtggcggcgattgctgcgctggaaggcgaccaacagtgcgtgaaggacatcgccgagcagtaccgccagcgccgcaacgtgctggtcaagggcctgcatgagctgggctggatggtggagaacccgaaggcgtcgatgtacgtctgggcgaagattcccgagcagtatgccgccctgggctcgctggaatttgccaagaagttgctgctggaagccaaggtgtgtgtgtcgccgggcatcggctttggtgagtatggcgatgatcacgtgcgctttgcgctgatcgagaaccaggaccggattcgccaggcggtgcgggggattcgcgggatgttccgggcggatgggctcgcccccaaaaccggcgcctgactcagtctaaatgtgggagggggcttgcccccgatggcggtggatcagtcaccagatgctgtgactgacactctgctatcgggggcaagccccctcccacatttgttccgcggtgtggcttagaccaccaacgacagcagcatgatgaaaatcaacgccaccactgacagaatggtctccatcgccgtccaggtcttgaacgtctcggccacggtcatgttgaagtactgcttcaccagccagaaccccgcatcgttgacgtgagacaggatcaacgaacccgcccccgtcgccagcaccaacagctcacggttaacccctggaatcatccccaccaccggcaccacaatgcccgcgccggtaatggtcgccaccgtggcagaaccggtcgccacgcgaatcaccgccgccaccagccacgccagcagaatcgggttgatctgcgcgttcaccgccatgtggccgatcacatcacccacgccgctggtcaccagcatctgcttgaagccaccaccggcgccgatgatcaggatgatcgcagcggtcggcgcgaggctggcgtcgagcagcttgaggatctgcttggagtggatgccctggcgatggccaaaggtgtacagcgacagcaacaacgccagcagcaaggcggtgatcgggtggccgatcatgtccatccagttgcgtaccacgttaccttcggcaaacgcgatgtcggcaaaggttttgagcagcatcaggaacaccggcaacagcacggtgaccagggtgatgccgaagctcggcaggtctttgttctcaggctcgcgggccagttgatcgaccagttcctgggacgggttgcccgggatgtacttggcgatgaacgtgccaaagatcgggccggcgatgatggccgtcggcagtgcgacgatcaggccgtagaggatggtcttgccgatatccgcgccaaacacgccgatggccagcagcgggccagggtgcggtggcaccaggccgtgcaccgccgacaggccggcgagcagcgggatgccgatcttgatcagcgacacgccggtacggcgcgcgacgatgaacaccagcgggatcagcagcacaaagccgatctcgaagaacagcgggatgcccaccaggaatgcggcgaacatcatggcccactggaccttctctttgccgaaggcgcggatcagggtctgggcgatctgatcggcaccgccggattcggccatcatcttgccgagcatcgtacccagcgcgaggatgatgccgacaaagccgagcaccccgccgaagccgtcctggaacgccttgatgatcttgtccacgggcatgcccgaggtcaggccgaggaagccggccgcgatgatcagggcaatgaacgggtgcaccttgaacttggtgatcagaacgatcaacccgatgatggtaaccactgcgtcgagcagcaggtaggactcgtgggacatgccaaacatggggggtctctcctgtttgttgttgttattaaagcgggtgttgaatttcctgccggggacagcgctatcttttccggcaaaaaatcagttggatggttcaaaaccgtgttgcagccaccaggtattggtctgctccgccagtgcctcgacgctgtctgcgctggcgttgagggccagggtcagcggctcgcccttgggcgattcaagggtggcgaactggctgtctatgaggctggccggcatgaaatgcccggggcgatgggacacgcggtcggcggcaacttcacgggtcagctccaggaacacgaaacccaggcccggcgcggcttcgcgcaggtggtcacggtatttctttttaagggcggaacaggtgagcacgggatgctcgcccgccttgagcgaacggcgcagttcatcgcacaggatgtcgagccagccggcgcggtcgtcgtcgttgagggggtggccggcgctcatcttttcgatgttggcggcggggtgaaagctgtcgccttcaatcgcggtggcgccgttaaggcggcacagggcctcgctgacactggtcttgccacagccggcgacacccatgatgaccagggcggtaacaggttgactcatgaaacacctcaggacgcagatagcgctacctttgcacgctgtaaggctagtgcaaaaacaggcttttcccgcgccgtcttgtcatttttatggagtgacgcgtgcatcctctccaatcatttgaaccggatcaggcaacccagcgttcaagcatttgcagctacttggagacagcgctaccttagtgcctcgatttttgtttggcaagccgcctgatgacctccaagaacgataaaaaaatgcgcaccacgggtcgcccgacccttaatgaagtcgcccgcctggccggcgtcagcccgattaccgcctcccgtgccctgcgcggcatcagcaccgtcgccaccgaactggtggaaaaagtgcagcaggccgccgccgaactgaactacgtggtcaaccccgccgcccgcgccctggcctcggcgcagagccattcggtggtggtgttggtgccgtcgctgtccaacctgctgtttatcgaaaccctcgaagccatccaccaggtgctgcggcccaagggctttgaagtgctgatcggcaactcccactattcccgcgatgaagaagaaaacctgttgcgcaactacatggcctaccagccacggggtttgttgctgaccggctttgatcgcaccgaaagcgcccgacgaatggtcgaggccagcaatgtgccttgcgtgtacatgatggacctggacccgaacgccggggtgaactgcgtgggtttctcgcaactggcggcgggtgagacggcggcggcgcacctgctgtcccgtgggcgcaagcgcctggcgtacatcggcgcgcaactggaccagcgcacgctgctgcgcggtgaaggtttccgccgcgcgttgcagcaggcgggcttgtatgacccggcgctggaactgctgacaccgcgcccgtcttccgtgggcctgggaggtgaattgttcctgcagttgctggcggcccatccggacgtggacgcgatcttcttcggcaacgacgacctggcccagggcgcactgctggaggccatgcgtcatggcatcaaggtgccggagcgcgtggctgtgctgggcttcaacgacttgccagcgtcgtcgttcatggtgccgcgcctgagcagcatcagcaccccgcgtgaggcgattggccggcgagcggcggagcatttgctgacgatcatggcgggtaacaaagtggccaagccggtggtggatatggggtttgagttgcaggtgcgagaaagcacttgatcaatgtgggagaggcaagccccctcccacattgctatcacccctgctagattggtccttctccaaatgccagggaagcactatgggacactcactgaaaatcttgggccgcacgtcctccatcaacgtgcgcaaagtactctggacctgccaggaactgggcatcgactaccagcgtgaagactggggcatcggctactcccctacccaatccgccgaattcctcgccctgaaccccaacgcccaggtgccggtgctgatcgacgaccacggcgtgctgtgggaatccaacaccatctgccgctacctcgtcggcctttaccaacgccacgacctgctccccgccgaacccgcaccacgggcgcgcgtcgagcaatggatggactggcaagctaccgaactcaacccgtcgtggggttatgcgttccacgcgctggtacgccagaaccccgactaccaggacccacagcgcatccatgccggcgtgcaagcctggaatgacaagatgggcctgctcgaacagcagttgatcaagaccggcgcctacgtggcgggtgatgagttcaccctggccgacatcctcatcggcctctcggtgcatcgctggcgcaacgcccctctggcgcatccgccctaccctgcggtgcaggcgtattaccagcgcctcagccagcgccccggtttcaaaacctttgccctcgacggccataactgagcacgctgcgggagaaagcatccccaggatgacgcgtttcaaacagtcgagattccaatcacttattgagtttccccatgcccgcactctccagtaccgacggcatcgacccgatccgtgccgcccacatcagcgcacgcatcgatcgcctgcccgccgttgcgaccgtctggcgccttgtcgcgctgctgtcgataggcggttttttcgagctgtatgacctgttccagaccgcgtatatcagccccggtctgatcagcgatgggattttccacaccggcagcgagggcgtattcggcttctcggaccaggctgcctttgcttcggcgaccttcctcggcctattcctcggtgccagcctgctcagccccatcgccgaccgtttcgggcgccgggcgatcttcacttttgccttgatctggtacaccgtcgctaccgtgttgatggggattcaaacgtcagcactgggcatcatcggcatgcgtttcctggtgggtatcggcctgggcatcgaactggtgaccatcgacgcctacctctcggaactggtgcccaagcgcatgcgcagttcggcgtttgcctttgcgtttttcatccagtttctgtcggtgccggcggtggcattgatgtcatggtggctggtgccgcaagcgccattcggcgtgtcgggctggcgctgggtggtgctgagcagtgcggtgtttgcgctgtttatctggcaactgcgcaagcgcctgccggaatcaccgcgctggctcgcgcaaaagggccgttttgaagaggccggggcaatcatcgacatcctggaagcacgctgccagaaagaccatggcaagccgctggatgagccggaaccggaagccgtcagcgtgcaaggcagtggccgctttgccgatatctggcaaccgccgtaccgccgtcgcgcgctgatgctgatcgtgttccatgtgttccaggccatcggcttctttggcttcggcaattggttgccggcgttgctgtcgggccagggcgtcagcgtgacccacagtttgctctacgccttcatcatcaccctcgcctacccgctggggccgttgctgttcgtgaaggtggcgaaccgttttgaaaacaaatggcagatcgtcggctcggcgatgggcgcgatgatcttcggcagcctgtttgccctgcaaaccacggcggtgggtctggtggtctgcggggtgatgatcaccttctgcaacgcctggctgagcttcagctaccactcctatcagagcgagttgttcccgaccaacatccgcgcacgggcggtgggcttctgctattcgttcagccgcttgtccacggtgttcagcagcttgttgatcggttttatcctcgagcatctgggcacgcctggagtgttggcgttcattgccagcagcatgctgatcgtgatgatcaccatcagttggttcggaccgcgtacgcggaacctggcgctggaaaacatcgcccactgagcaaggtagcattcggcggggggtcaatgtcgatggcacgtcccccccttcgttcgtagggcagttttatattgatcccgcctgactgtagcaaaccccgacactatcgaaacaactgccatgcctcacccaaccttggaacacgagtagctattagagctcttatatgaaatccatataaacctaattcaaaaattgccacacctctccagtaaaaagtcaaacaccgaactatgaatcgcttaccgcaacgaatctactgtcaacctttacagtagacaaaataacgcgcccatttacactcactccatctctaaaaagagagccccgctcaaactcaaacagaaaggaactcgccatgaccgcaaatacgaagccaatctccgcaagtttcataaccaataaaacgccaaaggccactgggcacttccaggtctccaagtcgcctcaaggcagtttcacaacagacacggtctttctgtcacagacagaacaatacaatatcgtggaatgctttattaaatggcccaatggagaagaagtcattattagtttgattgtcgaaaaaattccaggagagtcgaacggaacattcctcggggctggcatacgcccttggtccacttataacgctaaggacgccaacggaaatggtactttctactggtccgatcaaggctcctacagcatcgtttatatcccgaacatcaaacatgtcactggatccgtaacatccatctcaatacgtgacggagaagaagtcgaaattacatataattttgatgtttctgtctgaggttagaccttaaaacgccttgccttcgacatccatttaaatagggatcaaacgcagcccgaagctgccagtgtgccaaactggctttggaaaatatcgcccattgacggcaatggctggccgccggcaggacaacccttgccgcgtcggccacgccatccccaataaaaccgggcacttcacacccggcacgctatttgctccacctgtggcaccgcacatttccacaggtgaccgatcatgctggttaacaacaacacccaagccgtgtcgaccgttcaacagatcaaacggcccgacatggatcccgccaacgccgccgccagcgcgctgtacagcggtgccctgcaggccgcgcagcaaagcgtgaccgtgccggccgcgcagaaggaactggacaaggccgccgaccgcatcgacgaagccttcgccaagactcgtgtgcagttgcagaccagcgcgtcgacctcggatgtgccggctaccagcgccacctccggcgcacgtgccgagttcacagactacatgagcaaatctccggccgagcgtatccgcgagcaattgctcaaggagcagggtttgaccgaggcggatgtgcagaacatgtcccaggaaaagcaggacgctatttccaagcaggtggctgaacgcctgaagcagcagcaagaacagcaagtagcggcgaaaaccgctgagccgcaggcgcagacagtcaaagaaaccctggccgcgatctgacgccgcacaaccctgtaggagccccccgctcctacaggttattgcagttgcaacgtcgagttgaactgcccgatcgcgtccaccacatgccgtgacccttcctgaatttccaggatcacctgccccgcttcattcgccagttccacccccaggcccgtgcggctcaagctcgactgcatgctcgacaccgcgctcagcgacaggtcgtggttcttgcgcaccacatcgacaatctccaccgtcgcctggctggtacgtgccgcgaggctacgcacttcatcggccaccaccgcaaagccgcgtccatgctcgcccgcccgtgccgcttcaatcgcggcgttgagcgccagcatgttggtctgttcggcaatgctgcggatggtctgcacgatgctgccgatgatgtccgactgcttgctcaccgcatcaatgctttgcgccgcctggttcaggtcgtgggaaatttcttcaatgatctgcaccgtctgctgcaccacctccgagcccttgcgcgcacaggcgtcgttttgcaccgaggtggcgtgagccgagtcggctgcggttctcagggtggtgacctggtcggtgatgtcgctggcgaacttcaccactttgtacaggcgcccactggtgtcgaagatcgggttgtaggacgcctccaggaacaatgtcttgccgtatttgtttttacgctcaaagcggtgcgagtggtattcgccgcgattgagcgatgcccagaacgccttgtaggccggcgactccacttcgctgcgatggcagaacatgctgtggtgctgaccgacgatttcatccagggggtactgcacggttttcaggaagttttcgttggcgttgaggatctggccctggggggtgaactcgatcaccgccatggaacggctaatggcatcgatcaggctctggttttcatgttcatggtgaacccgcgcggaaatatccgacgcgaccttgattacgctctgcacgtgattgtccttgtccagcaccggcatatagctggcttcgagccacacttcctggccgtgcttgttcaagcgcatgaaggtgccgctgagcgcctcgccacgtgccaggtcgcgccataacttggcgtaggcatcggtgtgggtgtaagcctcatcgcaaaagatacggtgatgtttgccacggatgtcttcggcgctgtagcccatggtttggcagaaattgtcgttggcgtcgaggatcacgccggagggatcgaactcgatcatcgccatggagcggctgatggcggcgagtttggcattggattcggtcagggcgcaggaaaaacgttcaatttgttgcaggtcggatttgtgatggcggttgaacatgttcggatcaccctttcaaataccagcgcctggcaaggcgcattccattcacggattgaatattgctggcagatctttatgggaacaaccatccgaatcgctttataggccaagcgtcatcaacggttctggatgagcatagacagggcttgccgctacgcaaggtcactagtcaaccagcatttccaacagtgcgctgaccgcggctgacggtggacgactcggcgtgccgaccaaggcaaattcacgatactgaggcaccttcagcgccatcacccgcaggcccttgcgctggataggcagggctatttccggcaccagcgtgacgccaaccccctcgcggaccaggctgaaggcactgttccattcgcgcacttccactcggacatcccgcagggtcagacccgctgcggcccccaggctgcgcgcattggcggtacaaccaccggtagccagtacgaaaggctgctcaagtaactcctcaagcgacacacacgcatcagtcgggcgttgcgccagcacatggtccaccggcaacacggccatccataagtcacggcccaacacggtcgcattgcgctcaggcgtggggttgagcaccacgcccaggtcgacgaggccgctatcgagcaaggtgagcacttcgttgtcggtgacatccagggtggtgacctcgataccgggatagagctgcgcaaaacgctgcaatgcgggggtcagaaacgtcgccagcaccatcgggaaactggcgatgcggatcgtcccacgcaacatgggcctggcttcatccacagtgctgcgaatcgcctgcaaggcgccgagcatcacccgcgcctgttcgatcacactcaagcccagggccgtgggcaaggtcttacgcggttcacgggtgaacagttgcgcgcccaacgtcgcctccatgcccgccatggcctggctggcagcggactgggtcatgcccacgcgctcggcggcagcggtgatgctgccgtgatcggccacggccaccagcaggcgccagtgcatcaggttcatcatggcagtagctgtccttatggcgggggtctgaaggtttaattttacgcacggtgccacgcccgcgagactggcgcaaattcaacggagctgcctcagatgaaactgtatttcttcccccacgcctgttccctcgcaccgcatatcgtgctgcgcgaattggcgttgccgttcgacctggtgctggtcgataaccaggccaagaccaccgccgagggcgaagacttcctgcagatcaaccccaagggttatgtcgccgccctgaagctggacaacggccaggtactcaccgaagccagcgcgatcctgcaatacctcgccgacctgaaacccgccgccggcctggctccggtcaatggcagctgggagcgggtgcgtttgcaggaatggctgaattttatcgccaccgagattcatggtggcttggcggtgttcttcaacgacgcgatccagggcgacgtgcgcgcgctgttcgaggccacgctgttcaaacgtttcgcggtgctggtgcaaacgctggagcgccaggattacctgttggggtcgcactactcggtggcggatgcctacctgttcgtggtgctgcgctgggcagcattccacgcgattgacctgggccagtggccggcgctggcggcgtttcagcaacgcgtgggtgagcgacctgcggtggttaccgcactggccgctgaaaacccatgagttgagacgaagctgctcagcgccagcacatccagcgagcccgagcgatcctgatcatgcgtattcacctgtaaaccatgcccccggttagatatgtaaacgatgtccccggtttgtaccggggcaagcccgctcaccacacattcatggcgccttgaagacggcttgctgcacgtcgacctttttcgggatcaggccgttggcgaagaacaggtccgccgtgcgttgctgggtagcgacgtccgaggcttgcagcggccggatcggcgcgggcgagcggtgttcgaagtagcttttcaccaccgccggttgcaggcccagggtcttggccatcagtgcaatgctttcttcaggcttgtcgagggacaggcgctgcgccttgcccagggtctggatgatcgtgccgatggactgcgggtactgcttggcaaacgcgctgctgaccacaaaaaaactgccggccggattgaggccttggccgtcacccagcacacgggcggagccgtcgaccacggcggcggagtagtacgggtcccacaccacccaggcatcgactttgccttgctcgaacgcagcacggccatcggacggcgacaggtacaccacgttcacgtccttccattgcaggccggcgcgcagcaggcttttgaggaacaggttgtgtgcgctggagcccttgagcagcgccacgcgcttgcccttcagttcagccacgctctgcacggggctggccttgggcaccagcaccgcttcggtcttgccctcgttgggctcgacggcgaagtactgcaggtcgataccggcggcctgggcaaagatcggcgggatgtcgccgatattgccgatgtccaggctgccgccattcagcgcttcgatcagcggcgggccgccgaggaactcgatccactgcacttgcgtgccgggcagcgccgcttcgaagagtttgtgctcacgggccagcaccatgctcaccgagcttttctggtagccgatacgcaaggtggagggctcggtcgccagcacctgaccggcgatcaatgacagtaccgccgcagcgaagactttaagcatcagagcgcccccttgaccttggccgcgacatccgccggcacccattgctgccagacatccggatggtccttgaggaaggcttcagccacctggcggggcggcgtgcgtttctcgctcatgtcgccgaggatgccgttgagcaaatcaatcggcaggtcgaccttttcaaacacgctcaccagttgcgggtactgcgccttgaacggtgctgacacaccaatcgccaggcgcgccggcatcgagcgggtgccgatagggttggggtttttcgcgtcggacagggtcttccaggcgtcggcgttgaacggcggctcttccagcttgaccagcttgaagcggcccagcagcggcgtcggcgaccagtagtaaaacaacaccggcttgccgcgacggatcgacgacgccacttcggcatccagcgccgcaccggagccggtgcggaagttgacgaagctgtcggtgagcttgtaggccttgagtttctggctgttgacgatctccgaggtccagccggtggggctgttgaggaagcgcccacggctcgggtcttcggggtcgcggaacacgtccttgtagcgcggcaggtcggccaccgacttcaggtccggcgccaggggcttgataccccgcgcggcatcgcccttgatcacgaactccggcacccaccagccttcggtggcgcccttgaccgtgtcgcccaggccgaacaccttgccctcgttttccgccttgacccacgccggactgcgcccggcccattcttcgccgatcacctggatatcgtccttggccagggcggcttccaggctcacggtgctaccgggcagggtgtcggtgggcaggccgtagcccttctcgacgatcaggcgcagcacctcggtgatcaggctgccgctttcccaggtgatgtcaccgaagtggatgggtttgacggcttcgccggcatggacggttggggacagcaggctcagggccagcaggccgccgcccaggagtttcttcagatgcttcatcggcaacctcatagttgtgcggtgatgttcgttaaaagtcataactgggccgcgtgtaattcgccgctcaggtcgtcgttcattccaggcacagcctcaggcgacggttgaaggcgcgggtcatgtagtcgctgaccgaacgctgggaaatccccagctcggcggcgatttccgggtaggtcaggccattgagctgggacagcaaaaaggtcgccttgaccttggcgggcaagccgtcgagcagatggtcgatggcttgcagggcttcgagcatttgcgccagcgcttccggggatggcgcgacggaggtctcatagttatcgagagcgtcgaggtaggcgcgctccaggtcacggcgacgccacagttggtacatcaggcgctgggcgatggtggtgagcaaggcgcggggctggcggatcggcaccacgcccggcgcactcaggagctggacgaaggtgtcggcggcaatgtcttcggcgtgggcgcgggaatcgaggtggcgctgcaaacggctgcacagccagtcgtaatgactgcggaacaatccgcccacgtaatcgctgtgagaagtgtcggcgccggacatagtggctccatctgagaaggttgcacgttatgtccggtgttccggtggagcgatcctaacaaggctgcttattctttaataatatttaaaaggtatttttatataaccttattgaattatcggataacccgcgttgacggcctgatcctgatagctcaagagcaccgcatagtcgtcttcgctggcgcggagcacttcgtgcaagcccagtgtctcggccacctcgggcaagtcctgcaacgcctggttcatcgcccagcggatctggaccacctgttcatcactcaagcccaacgggccgatatagggcaaggtcgggctcggcgcactgcgggtaacgatgcgcagccccgccacctcccgtggcgcgaaacgggcgaggtagtcgtaggtcacgctgtcgatggcggcgaggtccgcacggtcttcgcgcagccagcgcaggctctcgcggtgggcgccgctgataccgacactggcgaagaaccgcccatcgcgttgcaggggtgcaaggcgttcgcgcaacaggttcatgccgctgttggagtcgtggccgttgatcacgccacggctgttgtagaagtccgccaggcggtggcgcgggttgtcgtcgcgggtcagcaacaggctgcaatgttcgccctgccggctgtggggcagctcatagcacgggcggccgatcacccggaccttgccgcgcaactgggtcatcagtggataaccgcaggtttgggtcaccagcaattcgggagccagccacagtccgggcaagtccagatgatcggcgtcgagacgacgccggcccaggcgttccaggatgcgcgacaaccactgttggttggcctgccggatcggctcgggcgcgacatacatcagcagttcggcgtagtgctcactcatgctcgtctctcacgcaaaggggtgccgggggctgtcgatggccttgagcccgtggcggccgatcaactggccgtagccttgcaccaggaagccaccactgcgtgcgatccattgttcacgccgggcgcgataaaccgtgggcagcaagtaccaaggcagtttcggcaaatcgtggtgcaccaggtgcaggttgttattgaggaacagccaggtccacggccaggacgcttcgttgagcacgctgcgttgctcgggccgggggtgcgggcggtgttcatagtaggaacggatcgaggccagggacaaggccggcacgctgaccagcagcaggtaatgccccatcgacagcgcgctgtagtgggcgatgaaacccagcatcagcacggtgataacaccgtgggccagccacatcggccacacctggggcaggcgctggcattcgtggcggatcaggcggccaatcgccaaaggggcagaaagcaggaagcggccgagcacggtcttggtcaccccatgcacgcagcgttcgaacagcgagctgtggtcccattgctgctgggagaggtagcggctttccgggtcgacgcccggcagggtcaagtcttcgtcgttgtggtgtagcaggtggctgtcgcggtacagcgtgtaggggtaccacacggcaaagggtgcatagccgaggattttattgagcagcagcgaacgggtgggatggccgtggagcagttcgtgttggaccgacaaccacagcgtcacgatcgggatcaacagcagtgtgctcaaccacaggcccagccaatggctgccgaggatcacggcgaaccaaccggcgtagatgccgatcaacagcaaccaggtcggccactcggttctggcggtaaagcgttgggccagggtttcgatttcccggcgttgggcaggatcaaggtagtgggccatcggcagctcagagcaggtgtttcctgctctgtgcaatggcgcgggaaaatcttgcagatcgtttggttctaagcttgtaactcagtgaccgaacaggcctgtctcggttttcttggctttcttgtcggcgcgtttttcatccgcggtctttgccggttttttcttcgcggctttctttgaatccatacctttggccatgatgcgtactccactttaaggggttgcagtgatgggtataccacctattgccgcgcacaaggcgtttataatccccggcccttgataacgctgcctgaagaccatgcccccattgcacatcgaaccgttggccgagccgctgtggccgctgctgaacaagttttaccgcaaccacaattcgtcgatgaaggcactcaagggcgggcgtttgtgggtggcgcgcgatggcgagattgttgccggcctgtgcctcacgcccgtggtcggcgggcagtggctgaccggggtgttcgttgacccggcctatcgcggccaagggctggcggcgcgactgatcacggcggcggcggccgatgtggacggtacgctgtggttactgtgccatccggaattggaagagatgtaccggcgcatgggcttcacccaggacacgctgttgccgcagtcgctcaatgaacggctggtgcgctacaagcgcaacaaaccgatgatcgcgatgggcttagatcgtttggtgaggtcgacctcggataatgtgtgatccgcgcgtacagggcccatgctagcctcggcggcacagtggccctttacaggatgatcatgaaaacgacgctcgcagctctctccctcactgccctgctcgccccagccttgagccaggccaccgacgccgcgatcagcgcccgacagtaccaaagcgtactggccggcagttggcgcgacccggccaacagtgcccgcgacggctatcgccacccgcagcagaccctggaattctttggcctgggcgccaagcaaaccgtgatcgagatcaccccgggcggcggctggtacagcgaagtgctggcaccgctgctcaaggatcacgggcagtacatcgccgccgtgcaagccgcgagcagcagtgcttacgcgcgcacgtcggaagagaacctgaagaagaaattcgcggctgaccccgcgcgctacggcaacgcctcggtggtggagttcgatcccacggcgccggtattcggcaaacctgcatcggcggatgcggtgctgacgtttcgcaatgtgcataactgggtagcggcaggcaccgcgtcggccacgttcagtgcgttctaccaggtactgaaaccgggcggcgtgctgggtgtggaagatcaccgggccaaggacggggcggatctgcaggcgatcaaggacagcggctacctgaccaccgcccaggtagtgaagctggcaacggatgccgggttcaagctggcgggacagagcgaggtgaatgccaacccgaaggacaccaaggattacccgggtggggtgtggacgttgccgccgacgttgaagttgggggagcaggataagtcgaagtatgtggcgattggtgagtcggatcggatgacgttgcggttcgtaaagccggccaaataatgctcaacctgtaggggccggcttgctgtggtgagtggggttcgtccgccaacccgaggggctgcttcgcagcccagcgcagggcaagcctgctcaccacaacaaacctgctcaccacaatcagcgcgtttgaaagtcagtcgtcggcagtggggtccatgtccgggaacatcacctcgataaacccgaacttgctgaagtcggtgatccgagacgggtacaaccggccgatcaggtggtcgcactcatgctgcaccacccgcgcatgaaaaccgtcggcaaaccgtacaatcggctcgcccttgggatcaaacccttcgtagcgaatctgttgataacggtttaccgcgccccgtaggccgggtacggacaggcagccttcatagccctcttccagcaccgggctgaggggggtgatcagcgggttgatcaggatcgtctgcggcaccggcggtgcgtccgggtagcgttcgctggcctcgaaaccgaagatcaccaattgcaggtcgacgccgatctgcggtgcggccaggccgacgccgcccacatgttccatggtctggaacatgtcatcgatcaattgccacaactcggggctgtcgaacatttccggcggaaccggaggcgcgatacgcagcaagcgctcgtcgcccattttcaggatttcacggatcatcgatcagacttcgtcaggggtgggcttggagtggtcccggccgaggcctgagacgtgctgtttttcatcagtgtggccgggttcgtcgaactctttttcaccggggtccttgccctcggcggacatgtgctcgatcactgcattcatctccgcgcctagcaacagcacggcggcggaaatgtagaagtacaggagcaacacgatgatcgcgccgatactgccatacatggcgttgtagtcggcaaaggttttgacgtagtagccaaagcccagggacgcgacgatccacaccactaccgccagcacggagcctggggtgatgaagcggaatttctgctcgacgtccggcatcacgtagtacatgagtgccacggcgaacatcagcaaaatcacaatcaacggccagcgcaggatggtccacagggtcaccacgaactcctgcatgccgatctgcccggccagccattccatcacttgcgggcccagcaccatcagcgcagcagcggccagcaacatgccggcgatgccgacggtgtagaaaatcgacagcgggaagcgcttccagatcggccggccttccaccacgtcgtaggcggcgttcatcgcgctcatcatcaggcgcacaccggccgaggcggtccacagcgcaatcacgatacccaccgacagcaggccacccttggattgctgcaactggtcgatcaccgggttcacctgctcgagggcctggggcggcaacaccagttccgactgcaggcgcagccaggtgaagaagtccggcaggtgcaggaaaccgatcagggcaatcaggaacaacaggaagggaaacagcgagaacagcatctggtaggccagtgcagaagcataggtaggcatttcgtcatcgacgaattccttgacggtacgcaacagcactttgtgcagcttgagaccatcgagaaccggaaaaatcatagcgtctcctttcgccgcaaaaagttgagtttgtgggcgactcaggggccgttttctacatcaaggtagcctatttggcgaccttgaaacaatttcgaaactttaatcacgccgtgtgacataaaaacggccatccgtggatggccgtttggactgcttgaaagcgcgtttacttggtcgcttttttcactgcgtccttggtgtcgcctaccgctttctgcacttcgcctttcttttcctgaatgacgccttcagcgcgcagtttgtcgttgccggtgactttaccgacaccttgcttgatattgccgaccgcctcgtttgccacgcctttaatcttgtcagatgtgctgctcatggtatttctccgaaagaacaatcaaggtttttgggtcattacctaaagattgacccgaggccgttgcgcagagtttcaaatatttttacccaggcatttcatcgccgaccgcaggtttggctttatgttttgcggccaacccacgagaatgcccggcacattcaggctataacgctgaataacagatcccgtaggaaggttatgaaactcaataaagcacaggccatcgcccgcagaaacaccgaactgggcggagccgtactcggcgtcaacaactgccacttcaccgacctggaccgcaagcgcaacatctggtggttcgacctgccggtgggccggattgccgtgggccagtacgagtggatccacctgttgatgcacaacgccgagaccgaccagttgttgcacctgaaggtgccaacgctgttcttgcgtgaaaagctcgaaggcctggtggtacgcaatgcgggcaagcgcaaaccggagatcactctggagctgagcgcggacaaggattcgttcttgaaggatgtgcgtccggcagggactggcgtgagcttcgcgcagttcgccctgtaaaaaacgctgttcaaaatgtgggagggggcttgcccccgatagcggtgtatcagtcagcacatcggtagctgacacactgccatcgggggcaagccccctcccacattggtagagcgttactttttaagaccgagcttcttcaactcttcatcgcgcagctcacggcgcaggatcttgcctacgttggtggtcggcaacgcatcgcggaattccacggccttgggcactttgtacgcagtgacgttggcgcgcatatgctccatcacctgctccttggtcagggtggcacccggcttgaccacgatgaacagcttgatgtgctccccggacttttcgtccggcacgccgatggccgcgcactgcagcacgcccggcagacctgccagtacgtcttccagctcattggggtacacgttgaagcccgagaccaggatcatgtccttcttgcgatcgacgatgcgcatgtagccgtcaggctggatgatcgcgatatcaccggtcttgagccagccttcgctgtcgagcatctcgtcggtggcgtcctggcgctgccagtagcccttcatcacctgcgggcctttgacgcacagctcgccggtttcacccagtgcgagttcagtgccgtcatcggcgatgactttacacacggtggacggcaccgggatgccgatggtgccgatctggatatgctggatcgggttcacggtagccaccgggctggtctcggtcatgccgtagccttcgcaaatgccacaaccggtcaccgccttccagcgctcggccgctgccaattgcagggccatgccgccggacagggtgactttcagcgcagagaaatccagcttgcggaacgcttcgttgttgcacagcgccacaaacagcgtgttcaagccgacaaagccgctgaacttccacttcgacagttccttgaccatcgccggcaggtcgcgcgggttgctgatcagaatgttgtggttgccgatcagcatcatcgccatgcaatgaaaggtgaacgcatagatgtggtaaagcggcagcggcgtgatcaggatctcgcagccttcattgaggttggagcccatcagcgccttgcattgcaacatgttggcgacaaggttgcggtgggtgagcatcgcgcccttggccacgccggtggtgccgccggtgtattgcagcacggccacatcgccgctggccgggctggcatcgctgaccggttggccgtgccccttggccagcacgtcgttgaacttgatcgccttgggcaggtgatacgccgggaccattttcttcacgtacttgatgacgctgttgatcagcaggcgcttgagcggcggcaacaggtcggcgacttcggtgacgatcacatgcttgacggcggtcttgggcacgatcttttccgccaggtgcgccatgttggccaggcacaccagggccttggcgccggagtcgttgaattggtgttccatttcccgcgcggtgtacagcgggttggtgttgaccacgatcaggccggcgcggatcgcaccgaacacggcgaccgggtattgcaggacgttgggcagttgcacggcgattcgatcgccgggcttcaagtcggtgtgctgttgcaggtacgcggcgaaggcgccggacagttcgtacaattcaccgtaggtgattgtcttgcccaggttgctgaaagccggtttgttggcgaagcgctggcaggactgcttcagtaccgcctgaatattcggatactcgtctggattgatttctgcggcaatcccggcggggtacttatccttccaaaagtcttcgttcatggaagcccactcctcagcgacgtcagcgacgcgaattcatcatcgcatttgatgcgattattattggtgtatgtttttttaggtgaatctggcgctttcaagcaggccgagacgtcacaaagcgcgccgagagtagcagctttgccaaaggccgcctagagccaaaagagggggccacggtcataaacacgactgtcctacaatatttggtcacactttaaaccaagctgaaatagcccgataaagagctctggaacagggctttcagaacagcaaggtacaaatgtgggagggggcttgcccccgatagcagtggttcagtctacacatctggtgactgtcccaccgccatcgggggcatgccccctcccacaattttcagcacatttcagatcaagcgatatcgcgcagctccctgcgcaagatcttgcctaccggcgtcatcggcaacgagtcgcgcaacacaatatgcttaggcaccttgtacccggtgaagttggtcttgcagtacgccttcaactcctcaaggctcaccccttcggcacgcgccaccacgaacagcttcaccgcctccccggtgcggtcatccggcacaccgatcacggcgcagttggccaccgccgggtgggccatcaccacgtcttcgatctcgttggggtacacgttgaaacccgagacgatgatcaggtctttcttgcggtcgacgatgctgacgaaaccatcgacatcgatcaccgcaatgtctccagtcttcagccagccttcggcgtccaacgcctcggcagtggcgaccggttgctgccagtagcccttcatcacctgcgggcccttgatgcataactcaccgcgctcgcccaacggcaactcgtgaccttgatcgtcgatgactttcatcgcagtgcccggcaccggcaggcccacggtgcccaggcgcgactggctgccgtaggggttggtactggccaccggcgaggtctcggtcaggccgtagccttcaccgatggagcagccggtgatggccttccagcgctcggccgtggccttcaccagtgcggtgccgccggaattggtgatcttgaggtgggagaagtccagggtcttgaagtccggatggtccatcaacgccacaaacagcgtgttcagccccagcaggcaggagaaccgccacttcttcagttccttgatgaaaccgccgatatccctcgggttggtgatcaacacgttatggttgccggtcaccatcatgcacatgcagttcgccgtgaaagcatagatgtggtacagcggcagcggcgcaatcatcacctcctgcccttccctcaccagcggctgtccatcatcggtgacctgggacatgcacgcccgcgcctgttgcatgttcgccaccaggttgccgtgggtgagcatcgcgcccttggccaggccggtggtgccgccggtgtattgcagcaccgcgatgtcgtccagggtcaccgggtggcgggtcacgcccaggcccgcgcccatgcgcagggcgcgcttgaatgacaccgcgcgcggcaggttgtaggccgggaccatcttcttgaccttgtcgaccaccgtgttgatcagccaacctttggcagcgggcatgaaatcgcccatcttggcttcgatcaggtagtcgatctcggtgtcgctgcacacctcctgcacccgcgaaccgaacaggttgaggtagaccagcgcacgcacgcctgcgtccttgaactggtgacgcatctcgcgcggggtgtacagcgggttggtgttgaccacgatcagcccggcgcgcaaggcgccgaacacggcaatcgggtaatgcagcacgttgggcatctgcaccgcgatgcgctcgcccggcttgaggtcggtgtgctgttgcaggtagccggcgaaggcggcgctctggcgctccagctcggcgtaggtcagggtgatacccatgttgctgaatgccggacggtcggcgaaggccttgcaggagcgctcgaagacttcgatcaccgacttgtaggcagagaggtcgatgtcgttgggaacgcccgctgcgcgtttgtcattccagaaatcaggttgcattattcttgtcctcttacctgagtgtgtccggccgctttctgactgctatgaaaagcggagctttggggacgttagcagcaatagccaaacaggcaaatacagcaaaccgtgtcattgattgtatgaatcttgccgctgacgtgtaggcagatgcgccgatcctcggcagatgagctatacactgcaacaaccccgagctgaccttgagcagcccctgagcaaaggaaccgccatgaaccacagcaccttctggctgaccgcgaatgaccgcagccgcctgtacgtcaatcaatggatgcccgaaggcccgaccagggccctggtgatgctgtcccatggcatggccgagcacagcgggcgctatgcgcgcctggcgcacaccctgtgcgacgccggctacggtgtgtatgcgccggaccaacgaggccacggccgcacagccgacgaaggcaccctgggcctgtacgccgagcacgacggctggaacaaggtagtgggcgacctcgccagcctcaaccagcatatcggccagcagcagccagggttgccgatcattctgttgggccacagcatgggcagttacatcgcccaggcctatctgctgcaccacagcgccagcctggatggcgcgattctcagcggttcgaatttccagccagtggcgctgtaccgcgccgcgcgggtgatcgcccgggccgaacggctgcgccaggggttgcgcgggcgcagtgcgttgatcgaattcctgtcgtttggatcgttcaacaaggcgttcaaacccaatcgcaccgctttcgactggctcagccgtgacccggccgaagtggacaagtacatcaatgacccgctgtgcggcttccgctgcaccaaccagctgtggatcgacctgctcggcggcttgcagcaaatcagcaaagcgtccaatctcgcgcagatcgatccgggcctgccgatcctggtgatgggcggtgaatgtgatccggtgagcgaaggcaagcgtctcaacagcctggccaacgccctgcgtgaagcgggctgccagcacctgcaactgaatatctacccgcaggcgcgccatgaagtgttcaacgaaaccaaccgtgatgaagtcacggcggatgtactcagctggctcgaccaggccctgacgttgcgcaggcccacccgctgcgaataaattttcgattaaaatcagtcagttaaattaccgattagccacaggatgcacgtttagatgacccaggtaaccaacaccccgtacgaagccctcgaagtcggccagaccgccagctacagcaagctggtggaagagcgtgatatccagctgttcgccgccatgtccggtgaccacaacccggtgcacctggatgccgagtacgccaaggcgaccatgttcaaggagcgtattgcccacggcatgttcagcggcgccctgatcagcgcagccgttgcctgcgagctgcctgggccgggcacgatctacatcggccagcagatgagcttccagaagccagtaaaaatcggcgacaccctgactgtgcgcctggaaatcctcgagaaactgccgaagttccgcgtgcgcatcgccacccgtgtgttcaaccagcgcgatgagttggtggtggatggcgaggcggaaatcctggcgccgcgtaagcagcaggttgtgacattgaccgagttgccgccgatcagcattggctgatagcaatttcaggctcaacacaacaccaatgtgggagggggcttgcccccgatggcggttgatcagtcaatgaatcggttgactgatactccgccatcgggagcaagctccctcccacattggttacagcatttacaaccctgggcttacgactgagcgcgagcctggttacgcagggctttcacctggtcgtggttgcgttgcacgccatggtactgacgttcaaccaggtcacgaatgcccagcaggttgtgcttgttgatcttctcgatcgcttccttgtaagccttcagtgcgtggtcttcaccgcgctcggcttcgttcagcaccgcctcttcatctttaccggtgagcatcgacttcacgtcgacccaaccacgatgcaaagcgccggcaacgctgccggaatcttccggatcaccacccagggcacgcacggcggtcttcagctcggcagcagcggtggcgcagtcggctgaacgcttggcgaacagggctttgagttctgggtgcttgatgtcttcagcgcactccttgaaacccttttggccgtcgatgctggtttcgatcaggtcgttcagtacggagatcgattctttattgatgtcagtcatttttcaattccttgtacgggttagaaggttgtcttagtggttgcagcgcccgtgccaggttttcaaaaaacaaattattcatatatttcagttatttacgattaattgaaccatctgtatgtacgttatttgcatgatctgtcatttggccttcatgcagaatgcctgtattttccaacgtcacgactcaaacacccgagcctgcatgaatcccgaaaaactcgaactgctgatcacccgcgaaatgcccttcggcaaatacaaaggacggatcatcgccgacctgcccggcccgtacctcaactggttcgcccgtgaaggtttcccccacggcgaactgggcggcttgctggcgttgatgcaggaaatcgacagtaacgggttatctgaattactcgaaccgctacgcgccaaacacggcaaacccgcaccgcgccattaagagccccccctatgccaaggaatgcagacaacgaacgtcattggcaggctgtttccgagcgctatgccctggaacccggcccgatcaatctggaaaacggttacttcggtcgcatgagccgaacggtgcaatcgcattacctggaacaggttgcgtttatcaaccgaagtaattcgctgcatgtgcgccaacgcttcgagcaaggcgagaacgtcgagattcgtcggcaactggccgagctgattgatgtggacccggagtcggtggcctttacccgtaacgccaccgaagccttgcaatcactgatccgcaactacaaccgcctgcaaccgggcgaccaggtgctgatcagtgacctggagtacgacaccgtcaagggtgcgatgcgttggctggccggcgttcgtggcgtggaggtgatcgaactgtcccacgcacacccggccagtttcgacagcctggtgcagacctatcttgatgcgtttgtgcagtacccacgtttaaagctgatggcgctgacccacgtcacccaccgcaccggcctggtgatgcccgtcgaagccgtcgccaaggcagcgcgcgagcatggcgtggacgtgatcctcgacggtgcccatgccctggggcagatcgagttcaacctggccgagctgggcattcagtttgccggcttcaacctgcacaaatggatcggcgcgcccctgaccctgggctttttgtacatcgccccggagcgcctggccgatatcgacccggacatgggtgagtttcactaccccaccaccgatgtgcgtgcgcgtacgtcctacagcacgccgaactttccggccttgatgaccttgccgctggtgtttgaagaacatcgcgccttgggcggctcggcggccaaaggtgcgcgggtcaattacctgcgggacctgtgggtgagccaggtgcggccgttggcgggaatcgaggtactgacgtcggatgatccacggctgtattgcgggatcacggcgttcaagtttgtagggcgggatcagcaggtgatgacagagcgattgctcaaggattacaacctgttcaccactactcgggtgggcgcggcgtttggtacttgcattcgggtgacgccggggttggtcacttcggcggcggatatcaatgtcttggtaaacgccatcaccgaactaaacaccgattaaaactgtgggagctggcttgcctgcgatagcggtgggccagcgaatgcatgtgtgactgatacaccgccatcgcaggcaagccagctcccacatttagagtggcgttggtcttaaggttttcttcaggcaaaaaaaagcggtacaccgaccaagtgcaccgccaaaaatgccgttaagcacagcaacaacgattcgataaatcagtccagcagcgccagtgcctgcgcggtgacttcctggatacgggcccagtcgccgttcttgacccactccgggtcgagcatccagctaccgcccacgcacatcacgtttttcaacgccatgtagtttttgatgttggccgggccaacgcctccggtcgggcagaatttcacttcgccgaacggaccgcccagggccttgatcgccgccacgccgccgctgacttccgccgggaacagcttgaagcgacgataacccagaccgtagccctccatgatgccggaggcattgctgatgcccggcagcagcgggatcgggctgtgtaccgaggcttccagcaggtcacgggtaatgcctggagtgacgatgaattgcgagcccgccacttcggccgcttcgagcatgtgacggtcgagtacggtgccggcccccgtgcacagttcagggcgttgttcgcgcagtacctgaatggccttgaggccgaactccgaacgcagggtcacttccagtgcggtcaaaccaccggctgccagggcatcggccagcggcagaatgtcctgttcgcgggcgatggtgatcaccggcaggatccgcgccttggcgcagaggctgtcgatcaaggcaactttgtccgccatggacacggtcggttgagggcttttcatagcggctgatccttggctcatgggcaccagtaaatctctaatgtaggttgcagaaacgcgcgaatcggcatggcagcgacgtcatcactggccagcgcggcgctcaaggtggtcaatttcgaactgccggaaatcgacagcacggtgtagttcgccgtggccagcaacgcgcgactcatggtcaggcgctggtgcggcacggtcggcgccagcatcggccagcaacgacgggtaccgtcgggctgcaaggcctggctcaggttcgggctgtcgggaaacagcgatgcggtgtggccgtcatcgcccatgcccagcaccagcacatcgatggctggcaattcggccagcaggcgatcggcctgctcggcagcgtcttcgaggttggcggcagcgctgtacaggctcaagaacctggccttggccgccgggccttgcagcaggtgctgcttcaacaggccggcattgctgtcggcatgttcgaccggcacccagcgctcgtcggccagggtgatggtgaccttggaccagtccaggccctgcttggccaggtgctggaaaaacgccacggggctgcggccaccggacaccaccagggtcgcttcgccacgggcactgatggccgtgcgcagttgctcggccacgtcattggccaggccttccgccaacagcaccggggtacggtactcatgaggggttacaccctggggcagtttcaaatcagatatcgccataccacgacctcccgtcccgcgtgatcagtgcaatcgagctcatcggcccccaggacccggccgcgtacggcttgggcgcatcaccggatttcttccacccggcgatcaactggtcacaccacttccacgcggcttcgatttcatctttgcgaacaaacaggttctgattgccgcgcatcacttccagcaacaaccgctcgtaggcatccgggatccgggcgctgcggtaggtgtcggaaaaattcagttgcagcgggccgctgcgcagttgcatgcccttgtccaggccctgctccttggtcatcacacgcaaggaaataccttcgtccggttgcaggcggatgatcagcttgttgctgatctgcaggcgctgctcgggggcgaagatgtagtgggacggttccttgaagtggatgacgatctgcgacagcttctgcggcatgcgcttgccggtgcgcaggtagaacggcaccccggcccaacgccagttgcggatatcggcacgcagggcgacgaaggtctcggtgtcgctctgggtgttggagttttcttcttccaggtaacccggcaccggcttgccggcgctgtagccggcgatgtactggccgcgtaccacctgagtggtcaggccgtccgggctgatgggcgccagggccttgagcaccttgaccttctcgtcgcggatgctgtcggcggacaggtcggccggcgggtccatggcgatcaggcaaagcagttgcagcaggtggttctggatcatgtcccgcagctggccggccttgtcgaagtaaccccaacggccttcgataccgacctgctcggccacggtgatttccacgtgggaaatgtagttctggttccactgggtttcgaacaggctgttggcgaaacgcagcgcgatcaggttctggacggtttctttgcccaggtagtggtcgatgcggtacgtgcggttctccgggaagaactgcgccacggcgtcgttgaccttgcgcgaggattccaggtccgaaccaatcggtttctccagcaccacgcgggtgttgtccgccaggccgaccttggacaggttctcgcagatggcgccgtacaccgccgccggggtggcgaagtaggcgatcaggcgctgctcggtaccggcgatgtccgccagggccacgtagtcatcagccttcaggaagtcgacgtgcacataggtcaggcgcgccaggaagcgctgggcgatggtttcgtccagttccttgccgacgaactctcgcaatgcgtgctcgatgtgcgccaagtgctgttgttcggtgccggcttcgcgggccagggccagaatgcgcgtgtcgtcgtgcagcaggccggcgccatcgagttgatagagggcaggaaataacttgcgcagcgccagatcacccaaggcgccaaacagggcaaaggtgcagggttctacggttatcgaaggcatgatgtttgttcttttatcaagttaagctacaaataccttttttcaaggcatcactcaaggaaaaatgtagtaataaccacaacattttcccgaaatacgcattccgagtggtggtgttcagctaccctcagtaggataggccaccgcaaaaggccactcgtcgattggttgccaccctaatttgcatcgtcgcccgaaggaaagactgaatggaccgcgtgcgaaatcttctggaacagatccggaaccgcctcgaagaattgaacaaggccgagaaaaaagtcgccgaggtcatcctgctcaacccgcagcaggcgacccgcttctccatcgccgcccttgcccaggccgcctcggtcagtgaaccgacggtcaaccgtttctgccgttcgttcggcgtgagcggttaccctgaactgaaattgcagctggcgcaaagcctggccagcggcgcagcgtatgtcagccgcgcggtggaggccgatgataaccccgaggcctacacccagaagatttttggcagcgccatcgcgtcgctcgacagcgcctgccaggccctggacccggccctgatcagcaaggccgtggacctgttgatccaggcgcggcagatccacttcttcggcctgggtgcttcggccccggtggcgatggatgcgctgcacaagttcttccgcttcaacctggccgttaccgcccatgccgacgtgctgatgcagcgcatgatcgcctcggtggcgcacactggcgagttgttcgtgatcatttcctacaccgggcgtacccgtgagttggtggaagtggcgcgcatcgcccgtggaaacggcgcttcagtgctgggcgtgaccgccgagaactcgccgctggccaaggccagcacggtgagcctgaacattccactgcccgaagacaccgacatctatatgccgatgacctcgcggatcatccaactgacggtgctggatgtactggccaccggcatgaccttgcgtcgcggggtggatttccagccgcatttgcgcaagatcaaagagagcttgaatgacagccggtacccggttggggatgagttcaactaagccggcctttgtgttggctgtactggcctcatcgggggcaagccccctcccacactttgatctgtgaatacattcaaaatgtgggagggggcttgcccccgataaggccagcagccacactgctatacccctgctcgagcctgcaaactcaaatgcgccctctcccccggcgccaggctcgccccggccatcgccgactccacgcacacaaaccccgacgcctcgttgaagctcacgcccaacagcggccggctgcccgggtgccacaccaccgtgtcggcgctgtcgccggtgtcgatgcacagttcgcgctgccaggcgtggtccttgagctgcaattcgccctcgtgctggaacacccgctggcaaccgccctccacccgcaattcaccttcctgctggcagacctgacgattgagctggtcgtaaccttgcgcaccgtcaagcccagacagcgctatctcatcaacatgaccaatacgccaataagcgtgcaatgcatggctcagctggcacggcaactcatcctgatgctcggtgctcaggcgcagctccagggtttcgcccaggtgcgcatgcaggtcgacctgccagtcgcacagctgcaattgccagtgcaggcgcacaccgtcgtcgtcggtgctgctgtcgagcaatttccagtcgatcaagcgcgcccagccatgggacggccaggcattttcactcgggtggcggccataccacggccagcacaccggcacgcctccacggatggcaccgacttgcggccacttggcggcacaccacaaccagggtttctggccggtcggctgaaagtgcagcaattgcgcgccttggcgactgaacaccgcctggcacagcggatgatcgatcaccaacacgtcacgcatctggaaacgctcccaggcgaacaccgggcgctcgcgcaaggatttgaaaaagcgttgcagcggttgctcatgcatgtgccacagtcctgaaaatcatcacaatgcagcccaaaaaaaagcggatagccatggctacccgcaaaatgcgcacagagagaaggagcttatcgcaacagcgttagaacgtagactgaattttcaggccagccaccaacgcgttgtcgactttgtccacgccgccaggctggacgacgtattgcaggttaggacgcacggtcagccagttggtgacgtggaagccgtagttgatttcgaagttgtactcggtttcgcggattggcgtgtaaagcgcattgtcgtagtcgttcacgccattggcgacgttgagcagttcggcgtttttcttcacgtcgttgttgacgtgcagacgcgcggcaccaatacccacgtcgtcttttggacgcgcatcgaatgggcctttgtacaccagcatcaacgactgatagttgtcgaccaggttggtttctttgtcgtggaaggtggcgttggccgcgatgttcagaccgcgggaagcgtcgccgttgtgcgtggtgagctgctgttgggcaacgaaccagtagcctttcttgctgctgtgggtacggtaggcggcgccagtggtcgctgcatcgttgccgttgatgtcttcacggacgtcagaggcatcagccgcgctcttgtagtaacccacacggtattcgcccggcaggttgttgaccttaggcgaccagaccaattccaccgggatcacggtgcccttggtgccgctgccgctgagcttgaagccgttgccgtgctccagctgcgacgggttctggttgtacgcaccgatctgcgcatacagctcaggcgtgatgttgtacttcacgcggatcgcggcctggctgaccggccagttgtaccaggtgttgacatagttacccacttgcgagccgcagaacgacaggttctggaagtcgcacgggaaggtgttgaagtcttcgccttcgccgaagtagccgagtttcacgtccaacttgttgtcgaacatctggtgctggatccagaactgggtcagacgcaccatgtggccacggccgtagacttccatcgaagagctcagcgtgccggcacgcgggtcgccaatgcggtcgttggagatgttctggccattacggttggtcaactggatcttggcctgggtattgtcccagccccacagtttttgcaggtcaagtgccacgccgagaccgaactggtcagagtaacgaccggttttgtcgtggttgtagccgcccttggcgttgtagcccatctccccaacgtagtcagccttgatgtcgataccttgctcgatcagcttggtacgctcaccgccccaatcgccggtcatccacttggaatcagcgctgaatgcatcggccgccatcgcattggcggacagtaccagggctgctgcagctgacatttggcagatcagccgagtgttgttgtgttgctttttcatccctacatcctcgtctttattgttattaaactgtttttatctaacgcggtttactttttttatctaaaacaacaacttatctgcttcagcggcctttgaattgggccacgttgtcggcatgcccctgtgtgggcgatgaagaaacagtgcccagtcgctcgcccgtgttggcgtcgaacagcagtaccttggaaggatcgaattgcagggtcagggtctcgcccacctgcggtgccacgtcgggtgccaggcggcagcagaccttggtgtcattgagttgcacgaacaccagggtgtccgggccggttggctcggtcacctggacttcggcacgaatgctcgacgcactgttgccctcgcccgccgccaacatgatctgctccggacgcaggcccaggatcacgtcgcgatcttccaggccggcatccgtggtgttcagggccagctcacaacgcgcctggccgctgtcgagcaatgccaccaggcggccgtccttgcgctgcagacgcagcggcacgaagttcatcggcggcgaaccgataaagctcgccacgaactggttggccggattgttgtagatctctttcggcgtgccgaactgctggatgatgccgtccttcatcaccgcgaccttgtcgcccagggtcatcgcttcgatctggtcgtgggtcacgtagaccgtggtggtcttgagacgctggtgcatcagtttcatttcggtacgcatttcgacacgcagcttggcgtcgaggttggacagcggttcgtcgaacaggtagatcttcggccgacgcgccagggcacggcccatggccacgcgctgttgctggccgccggagagctggccaggcttgcgattgagcaggtgttcgatctgcagcagcttggccacccgcgccacttcggcgtcgatatcggcctggggcatcttgcggatcttgaggccgaactcgatgttctcgcgcacgctcatggtcgggtacagcgcgtaggactggaacaccatggcgatgtcacggtccttggggctcatgccgctcacgtcctggtcgccgatcatgatcgcgccgccggtgatggtctcaaggccggcgatgcagttcatcagcgtggatttgccgcatcccgaaggaccgaccaggatcaggaattcgccttccttgatcgacagttcgatgttcttcaaggtgtcgggcaggccggcgccataggtcttgtttacattgcgaagttcaagcgtagccatgattaccccttgaccgcgccggccgtgaggccgcgcacgaaatacttgcctgcgatcacatagaccagcagggtcggcagcccggcgatcatcgccgccgccatatccacgttatattccttggccccggtgctggtgttgaccaggttgttcagcgccaccgtgatgggctgggagtcgccgctggagaacactacgccgaacaggaagtcgttccagatctgggtgaactgccagatcaggcagaccatgatgatcggggtcgacatcggcagaatgatctgacggaagatggtgaagaagcccgcaccgtccagacgcgcggccttgatcagcgcatccgggatgctcacgtagtagttacggaagaacaacgtggtgaacgccagcccgtagaccacatgcacaaacaccaggccggtggtggtgctggccaggcccatcttgccgagggtgaacgacgccggcagcagcacggtctggaacggcaggaagcagccgaacaacaacaggccgaagaacagctgcgaccccttgaagcgccagaacgacagcacatagccgttcaatgcaccgatggcggtagagatcagtacggccggaacggtgatcttgatcgagttccagaagtagccgtccacagtcgcccaggccttgacccagccgatgccggtgaccacggtcggccagctcagcaggttgccggagctgatgtcttccggggtcttgaagctggtcagcagcatcaccaccagcggcaccaggtacagcagcacggcgaggatcagcaccgcgtagatcgcgatgcgactcaggctgatggcaggtttggaggcgagactagtcatgacgtttggtcctcagctcggagtagaggtaaggcacgatgatcgcgaggatcgcaccgagcatcaggatggcactggccgaacccatgcccatctggccacggctgaaggtgaacgagtacatgaacatcgccggcaggtcggacgagtagccggggccgccagcagtcatcgcggctaccaggtcgaagctcttgatcgcaatgtgcgccaggatcatcaccgcactgaagaacaccggacgcaggctgggcagcaccacgctccagtagatgcgcggcaggctcgcgccgtcgatctgtgcggcgcgcacgatcgattgatcgacgccacgcaggccggcgagaaacatcgccatgataaagcccgaggcttgccacacagcggcgatcaccaggcagtagaccacgcggtccgggtcgatcagccagtcgagacggaagccttcccagccccagtcacgcaggagtttgtccaggcccatgcccgggttgagcagccatttccaggcggtaccggtgacgatcatcgagagcgccatcgggtacaggtaaatggtgcggataaagccttcgcgacggattttctggtcgaggaagatcgccagggtcacgccgatgaccagggtgatgccgatgaacatcccgccaaacaccgccaggttcttgctcgctacccaccagcggtcgttgtcgaacaaccgcgcgtattgcgcaaggcccgcccatttgtagcttggcaggaacgtggaattggtgaacgagagtacaaacgtccacaggatgtagccgtagaagcccaccaacacgatgaacatgctgggcgccagcaccagtttgggtagccagcgctgcagtgcatcgaacggcgaggctttgctgaacacagcaacagaactcatggggaaatccagtacagggaaaaaggactacaggaacaagccttgcggggggccagggagtccccccacaaggtcaaccgttacttggcggacttgatcgcagcgccaagtttcttggcggtgtcggccgggtcggctttcgggtcgttgatgtagttggtcacgacgtcaaagaacgcaccttgcaccgccagggtcgtggccatgttgtgcgccatgcttggctgcaggccgccggtcttggcgtctgccaggaagtccttggcagcggtctgggcgcaggagtcgaagccgtacgagtccattttgttcagcatgtcgttacgcacagggatcgaacccttgttgatgctgaacactttctggaagttttcacccagcacgactctggcaatgtcctgctgaccggcagcagtgcctttgtctttctgcttgaacaccgccagggagtcgatgttgtaggtgaaggctttgtcggtgcccgggaaggctacgcactcgtagtccttgccggcgactttcttggcggcggtccattcggacttggcccagtcacccatgatctgcatgccggccttgccgttgatgaccttgcctgcttcgaggttccagtcctggcctttgccgtcgacgtccatgtaggtcgcgactttcttcagctcggtcaaggccttgaccatttccggaccggtcagtgcggcgttatccaggtcgaccagggctttcttgtagccatcggcacccatcaccgagagcaccaccgcttcgaacacggtgctgtcctgccaaggctggccaccgtgggcaagcgggatgaagccggctttcttcagcttgtcgccggcggcgtagaattcttcgagggtggtcgggttcttggtgataccggctttcttgaagacttccggattgatccacagccagttcacgcggtggatgttgaccggtacggcgacgtagtcaccttcgtacttcacggtatcggagactttcttgtcgagcagggagtcccacttttcttctttggcgacgtccttgagcacgtcggtgtcgagcaggccagtggacgcccattcctggatgtcggggcctttgatctgggcaacacctggcgggttgccggcgactgcacggcttttcagcacagtcatggccgtggcgccaccgccacctgcgacggcaccgtctttccaggtgaagccgtctttctcaacttgggccttcaggacatctacagccgccttctcaccacccgaggtccaccaatgcacaacttcaaccgtccctttcgagtcggcggcaaatgcactgaggggaaacaacgaggcaatggaaatagcgacggcgaggcgattaatcgcgttcatctgagtaccttttcttgttgttatgcatgcaagtcttaggcttgcgctgcacggagtttaaacagggttttttgaggcgcaggtaacaaagggatgcacaaatgtcaccagttggtgacatagcgcccagccccgatggcactggccatgctgggtgccaagggcagtgcgggcagcacgaccgcttgccaggcatggtacaggtccggcttgccgccccatattttgctgctgggttggttgtgcgggctgagttcgtggtgccagctgccgtggatgcggtcgataaagtgggtttcgcagaactcccagaaacgccggtaccaggtttcgtaatgcaattcgccggtgcgtttgagcaaggcctgggcagcggcgctggcttcggcgtgggtccagtgcaggcgctcgcgcaccaccgggcggtggttccagtccagggtgtagacgatgccgggggcgccatccaccgcccaggcgtaatcgcaggcactggcaaacaggcctttggcatcggtcaccagccattcgggtgtggcgagcccggcttgcaagcgcgcggcctcaaggtgcagcaccagccgcgcccattcgaagccatggccgggggtgatgccgtaggggcggaagccatcggcggggttgtcttcgttgtagccgagcaagggctgccaggtggtgtcgaaatgctcgatgaccatgtactggttgccggcggcatgggtgtggatcacacgttcgacgatgcgcagggcgcggtccagccagcgtgtatcgccggtcacatcggccagggccaggaacgcctcggtagcatgcatgttgctgttggcgccgcggtaggcttcgacgccgctccagtcctgggcaaaggactcaagcatcacgccctcctcctcgctccagaagaactggtcgatgatatggatggcgtcgttcagcaggttttgcgcgccgggagcaccggccaccaccgccgagctggcggccagggcgacaaaggcgtgcaggtaggcggccttgccacggttgccgtcgacggcatggggcgtggcgaaccagccaccgtgctcactgtcgcgcaacgggccgttgagggaggcaaccccgtgctcaatcagttcggcgtaaccgggcaaccccatggcgtgggccatggcgaagctgtggatcatgcgggcggtgttcatggtttcggcgcgggcatcggccggcaaccggcctttgtcgtccaggttgccaaagccgtcgggcagtcgagacgccttggcaaacgccagcaggcgctggccttcggcagcgagccagacgtgatgggcaggcgcgttcagccaactgctggcaggcagtggttgggtggtcatggggggcccttattattgtttgtgggatcaccggagtctaaacaagggcgcggtgggggcaagtaacgaaggggatgggaaatgtcaccgagtggtgacatttccatcagagactttattgcccgagcggggtgactctcgccggcgcgttgagctgttggttgagggtctgcacctggctctgcaaggtggtgatattgcgcgtggtctggatgcggaacacgtcgaactccttgttggtaggcccatcactgctggccgacgcgttgtcctgggcgctcttgagcaccacgaggtcctgttcgatacgggcgatggcggcgctggggttgccctgtttcttcaatgcggccacgtcggcggtcagttccttgatctcgttatcgcgcttggccgcgtcaccttgtgccgccttgagcgttgccacggcgtcggtcaacgcctggacctggccttgcagcttgctgttggcattggacaggtcagtggtgctggcggtcatttgcgccaggcgcttgtccagctcggtggcctggccggccacaccgacttgctgcttgccctgctccagcagctggctttcaagctgcttgatctgcagtttcagcgcttcgctgccgttgttgacgctggcctcgctggccaccaccttgccggaaatatcctgcaggcgccccgccgcttcttcgctgatgcgcgcaaagctctcctgggtggccaccaactgctggcccatcagggagatctgctggaagctccaccaggccaggcccgcaaaggcgatcagcagcgcaccgatcaaggcccacaacgggccggtgctggcgctcttgaccttgaccaccttggggttgcgcgaacgcaccgaggtggccggggtaggctcgaaatcatcgtcatccccgacatcggcccgcaggctgggaacgttgtcgaagtcgtctttagcatcgttacgcatgaatcaaccctgaatcggtgaggtggcgagcgacgggagtataaaccgcgttcccggcgctctgatcgacccggaacgccgaattcggttcccgaagtgttgcctgttgtgtgcttacttcaacccagggtcctgggccttccaccaactgcagaactcgtcgagggcggtccacaggctgacctttggctcgtaatccagataatgcctggcgcggctgatgtcgagggtgaaatctttgttcatcacttgcatgcccaggcgcgacaacgccggctccggacggcccggccacatcgcacaaaacgcttcgttgagcgccgccacgctgtaggacaaaccgtaggaccgataccgcgtcacctgcggtagctccatctggcgcatcacgtagttcaccacatcccacaccggcactggggtaccgttgctgatgttgtaggccttgcccagcgccgagcccgtggcgagcaggctgctgagcagcgcttcgttgaggttgtgcacactggtgaaatcgaccttgttgaggccgtcgccgacgatggccagacgattcttgcgctgcattttcagcaagcgcgggaagatactcatgtcaccggcgcccgtgacgaagcgcgggcgcagggccaggacttcgaggccgaactcctgggcaccgaacaccttctgctcggctaggtacttggtagcggcataggggtgtttgaagcgtttgggcacttgctcttcggtcaggcccagatgatcgcgcccatcaaaataaatcgacggcgacgacaggtgcaccagccggccgacacgctccttgaggcaggcttcgacgacattttcggtgaccagcacattgccctgatgaaagtcctgatacttgccccacaacccgacagcgccggcgcaatgcaccacggcttcgacatcgcggcagaggtcgcgcaccaggtcggcgtcattcaaatcaccctggataaactcggcgccgcgcctgaccaggtgctccacaccttcggcacgtcgcccgttgacccgcacgtccaggccctgctccagggcgaaacgcgcaaagcgcccgccgatgaagccgcttgcgccggtgaccagaatcttcatgtattaccccatgttctttcgtttttcatcgctgttgccttgacgcgcgtcatcactccaacggcaccaaccattggccacacgcctgggccagatgatcggtcaacaagcccagcagttgcccgccactgcgccaatgatgccagtacaacggcacatcgatgggcttatctggcaataactcgaccaagaggcccttttccagttggtcgcgtacctgcaattccggcaccaacccccagcccaggcccgcttccgtgaggcggataaagccttcggacgatgggcataaatggtgttcgaaaccgccatccacaccgagggatgccaggtagcggtgttgcaggaaatcatccggaccgaacaccaaggccggtgtgcgtgccagttggtcggcgcgcacgccgtcgggaaaatgccgggcaataaaggctgggctcgccaatgcccgataacgcatggcccccagcaacaggctacgcgccccggccaccgggcgctcgctggcgcagatgcaggccgccacctcaccggcacgcatgcgcttgagacctacagtctggtcctccaccaccagatccagcagcagatgctgctcggcgcaaaaaccactgacggcctcggcccaccaggtggcgaggctgtcggcgttcaacgcgatgcgcaggcgttcgggcatgccttcctcatccagggccggcacgtggctttgcaggtcgcgctccagcaagcgcacctgttgcacatggttgagcaggcgacggccaatatcggtgggcgtcggcggcgtggcccgcaccagtaccggctggccgatgcgcgcctccagcagcttgatgcgctgggagatcgccgactgcgacagccccagcacctgggcggcgcgctcgaagcccgcctgttccaccaccgccgccagggcggaaagcaatttatagtcgaacatcagtttctctaatgagcgatcagcaatattggtttttcttatacagcctgcgccctgagaatagccagcatcgcttctctctttacaaggaacctcccatggctggcgaaaccgccctggcaaccctgctgcgcagcatgagcccccatctgaatgacggcgactatgtgttctgcaccctgcccgatcagcgtatccccgccggttgcgaggtaatcggcagcttccgcgaacaggagggcctgaccctgatcgtcgaacgccaacaggcggaacgggctggcctggcctttgattacgtcgccgcgtggatcaccttgaacgtgcattcagccctggaagccgtgggcctgaccgccgccttcgccagcgcgctgggccaggccggcatcagttgcaacgtgattgccggctattaccacgaccacctgttcgtcggccgtgccgatgcccagcgtgccatgcacgtgttgcagcaactggcggcaaacgcggagtagaccctatgtggcagagctatctgaatggtttgctggtcgccctcggcctgatcatggccatcggcacccaaaatgcatttgtgttggcgcaaagcctgcgccgcgaacatcacttgccagtagccgcgctatgcgtggtgtgtgatgccctgctggtggccgccggggtgttcggcctggcgacggtactggcgcagagcccgatactgctggcggtcgcacgctggggcggcgcggctttcctgatctggtacggcgcctgcgcactgcgccgggcctgttcgaaacagagtctggatcagggcggcaacctgcaggtccgctcgctgcgcgcggtgatgctgagcgcactggccgtgaccctgctcaacccgcacgtgtacctggacaccgtgttgctgatcggctcactcggcgcccaacagaccgagcccggcgcctacgtggccggtgccgccagcgcatcgttcctgtggttcgccaccctggcgctcggcgcggcgtggctggcgccctggctggcacgcccggccacctggcgcctgctggacctgttggtggcggtgatgatgttcagcgtggcctatcaattgatcagtgcctgaggaatattccaaaacgctctggaacctctatcccacacagttgttgcgtggttttgccgcacccccggtgctatgatccggaccctgcgccgcaaagagtacaaactccccggcgcttgtttggccgcccgtgatcggccttgcgctcaccgcaactgacctgattaggagatttatcatggctttcgaattgccgccgctgccctacgcacacgatgccctgcagccgcacatctccaaggaaaccttggaataccaccacgacaagcaccacaacacctatgtcgtgaacctgaacaacctggtgccaggcaccgagttcgaaggcaagaccctggaagagatcgtcaagtcctcttcgggcggcatcttcaacaacgctgcccaggtctggaaccacaccttctactggaactgcctggcgccaaacgccggcggccaacctaccggcgcgctggctgaagccatcaacgctgcgttcggttcgttcgacaagttcaaggaagagttcaccaagacgtccgtcggcaccttcggttccggttggggctggctggttaaaaaggctgacggttccctggccctggccagcaccatcggcgccggcaacccgctgaccagcggcgataccccgctgctgacctgcgacgtgtgggaacacgcctactacatcgactaccgcaacgtgcgtccaaagtatgtggaagcgttctggaacctggtcaactggaagttcgtggctgagcagttcgaaggcaagaccttcactgcctaagcactgcttgcagtaaaaaaagcccggcaaatgccgggcttttttgtggttgaaatcaatgctggatagttggaactcactgacatgaatcggccacccagcacgtgagagaaataactctctcagttcatgcaggagagtacgcaatggatccgttatcgatagcgtcagctattacagggattgtgccgctgacaactaaaatcgccgatgtagtaggtaaaggtctggacttggcgggaaaaggcgttgacttatttagcaaggtgctggatttgaatagcaaagacgggaatgagccagcgagcaaaatctgcaacgacgttcatcagaagaatacggctcagattacttttaattcctaaaacatccttcaaccccgcgcgggatccgaaaatgcgttcgctttcgctttcgctcccgcccccttcactcgacagtgtccagattccttcaagccccaatgttcctttgactgccatgcccagattgccaatactcatggcatattgaaggccacccgcatgagacaaggaatgcccctttgaagctggaactcaaaaacagcttgtcggtgaagttgctacgggttgtgctgctgtcggcattgatcgtgggcgtcgcgctaagcgtggcgcagatcgtttttgatgcctacaagacgcgccaggccgtagccggcgatgcccaacgcatcctcgacatgtttcgcgacccctccacccaggccgtctacagcctggaccgcgagatgggcatgcaagtcattgagggcctgtttcaggatgacgccgtgcgcatggcgtccatcggccaccccaacgaaaccatgctggcggaaaaaagccgtgccttgcagcaagcgcccagccgctggttgaccgatctgatccttggccaggaacgcaccttcaccacggcgctggtgggcaaaggcccctacagcgaatattacggcgacctgagcatcaccctcgacaccgcgacttatggccagggctttatcgtcaactcggtgatcatctttatttccggggtgctacgtgccctggccatgggcctggtgctgtacctggtctatcactggctgctgaccaagccgctgtcacggattatcgagcacctgacgtcgatcaaccctgaccgccccagcgagcacaagatcccgcagctcaagggccacgagcgcaacgagttgggtctgtggatcaacaccgccaaccagttgctcgaatccatcgaacgtaacacccacctgcgccacgaagcggaaagcagcctgctgcgcatggcccagtacgacttcctcaccggcctgccgaaccgccagaaactgcaggaacaactggacaagatcctcatcgacgccggccgtcggcaacggcgcgtagcggtgttgtgcgtggggctggatgacttcaagagcgtcaacgagcagtttacctaccaggccggcgacaaactgctgctggccctggccgaccgcctgcgcgcccacagcggtcgcctcggcgcactcgcccgactgggcggcgaccagttcgccctggtgcaggccgatatcgaccagccttacgaggccgccgagctggcacaaagcatcctggacgacctggaggcagagttcgccctcgaccacgaaggcatccgcctacgcgccaccatcggcatcaccctgttcccggaagacggcgacagcaccgaaaagctgctgcaaaaagccgaacagaccatgaccctggccaagacccgttcgcgcaaccgctatcagttctacatcgccagcgtcgacagcgaaatgcgccggcgccgcgagctggaaaaagacctgcgcgacgccctcagccgcgaccagttccacctggtgtaccaaccgcagatcagctatcgcgatcaccgcgtggtcggtgtggaagcgctgatccgctggcagcatcccgagcatggcctggtaccgccggacctgtttatcccgctggccgagcagaacggcacgattattccgattggcgagtgggtgctggaccaggcctgccggcaattgcgcgaatggcacgacctgggcttcaccgacctgcgcatggcggtcaacttgtccaccgtgcaactgcaccacaccgagttgccacgggtggtcaataacctgatgcagatctaccgcctgccaccgcgcagcctggaactggaagtcaccgaaaccggcctgatggaagacatcagcaccgcagcccagcatctgctgagcctgcgccgttccggggcgttgattgccatcgatgactttggcaccggttactcatccctcagttacctgaaaagcctgcccctggacaagatcaagatcgacaagagctttgtccaggacctgctggatgacgacgacgatgccaccatcgtgcgggccatcatccagttgggcaaaagcctgggcatgcaggtgatcgccgaaggcgtggaaaccgctgagcaagaggcctacatcatctccgagggctgccatgagggtcagggttaccactacagcaaacccttgcaggcccgggagttggcggcatttctgaagcagtcggagcgtaacaacgcggtaattctttgaccggccaaaacgatactgaatatttcccgcgtataaccctttacacaaaatgcaaatctttcgcattatgtcgcagttttttgcgctccccccgcgcgccccatcaacaaccgaagcaggatgttcgccatgattcgtatgcccctggccaccgccagtctgctggccattgccatttctctcgccggctgtggcgaaggtaaagacaaggccgcagcgccacaggcgccgaccccggctgccagcactaccgctccagcggctgccacccctgccggccaggtcgacgaagcggctgccaaggccgtggtcgcgcactacgcagacatggtgttcgcggtctacagcgatgccgagtccactgcaaaaaacctgcagaccgcgatcgacgcgttcctcgccaagccgaacgacgaaaccctgaaagccgcacgtaccgcctggatcgccgcccgcgtcccgtacctgcaaagcgaagtgttccgcttcggcaacaccatcatcgacgactgggaaggccaggtgaacgcatggccgctggacgaaggcctgatcgactacgtcgacaagtcctacgagcatgccctgggtaacccgggcgccaccgccaacatcatcgccaacacccagatccaggtcggcgaagacaaggtcgatgtgaaggacatcactccggaaaaactcgccagcctcaatgagctgggcggttccgaagccaacgtcgccaccggctaccacgccatcgaattcctgctgtggggccaggacctgaacggcaccggcccaggcgccggcaaccgtcctgcgtcggactacctgacgggcgacggtgccaccggtggccacaacgagcgccgccgtacttacctgcgtgccgtgacccaactgctggtcagcgacctggaagaaatggtcggcaactggaaacccaacgtcgaagacaactaccgcgccaccctggaggcagaacctgccaccgatggcctgcgcaaaatgctgttcggcatgggcagcctgtccctgggcgagctggccggtgagcgcatgaaggtttccctggaagccaactcgccggaagacgaacaggactgcttcagcgacaacacccacaactcccacttctacgacgccaagggcatccgcaacgtctacctgggcgagtacacccgcgtcgacggcaccaaaatgaccggcgccagcctgtcgtccctggtggccaaggccgacccggctgccgacaccgccttgaaagcggacctggcggcgaccgaagcgaagatccaggtcatggtcgaccacgccaacaagggtgagcactacgaccagttgatcgcggccggcaacgatgcgggcaaccagatcgtgcgcgacgctatcgccgcactggtcaagcagaccggttcgatcgaagcggcagcgggcaagctgggcatcagcgacctgaacccggataacgctgatcacgagttctgatccaggtgggagggggcttgctcccgatagcagtgtgtcagtgaagcacgtgtttactgacacatcgccatcgggggcaagccccctcccacatttgactgcattgcctcaaccccggtttacatgccccgcaccccaggtagaatggcgcctctgccctatctcgagtgaatttcatggcgttgccgaccctgcgcatcatcggtttcatcatcggcatcttcctgatcactctcgcgatcgccatggtcgtgcccatggccaccctggtgatcttcgaacgcaccagcgacctgccctcgttcctgtgggccagcatgatcacctttctcgccggcctggccctggtgatccccggtcgcccggagcatgtgcacctgcgtccacgggacatgtacctgctgaccgtcaccagttgggtggtggtgtgtgtcttcgccgcgctgccctttctgctgacccagcacatcagctacaccgactccttcttcgaaagcatgtccggcatcaccgccaccggttccacggtgttgagcggcctggacaccctgtcgccgggcatcctgatgtggcgctcgctgctgcactggctcgggggtattggttttatcggcatggcggtagcgatcctgccgctgctgcgcatcggtggtatgcgcctgttccagaccgaatcttcggaccgctcggaaaaagtcatgccccgctcgcacatggtggcgcggctgatcgtggccgcctacgtgggcatcaccatccttggcagcctggcgttctggtgggccggcatgggcctgttcgacgcgatcaaccacgcgatgtcggcgatttccaccggcgggttctccacctcggatgaatccctggcgcactggaaacaaccggcggtgcactgggtagcggtggtggtgatgattctcggcagcctgccgttcaccctctacgtggccacgttgcgcggcaaccgcaaggcactgatcaaggatcagcaggtacaaggtttgctcggtttgctgatcgtgacctggctggtgctcggcacctggtactggtggaccaccaacctgcattggctcgatgccctgcgccatgtggcgctgaacgtgacctcggtggtcaccaccaccggtttcgcgttgggggactacagcctgtggggcaacttctcactgatgctgttcttctacctggggtttattggtggttgctcgggctcgacagccggcgggatcaagatcttccgtttccaggtcgcctacatcctgctcaaggccaacttgaaccagctgattcacccgcgcgcggtgatcaagcagaagtacaacggccaccgcctggatgaagagatcgtgcgttcgatcctgacgttttcgttcttcttcgccatcaccatctgcgccatcgccctggccttgtcgctgctgggcctggactggatgaccgccttgaccggcgccgccagtaccgtatccggtgtcggcccggggctgggggaaaccatcggcccggcaggtaacttcgccagcctgccggatgcggccaaatggatcctgtcattgggcatgctgctcggccgactggagatcattacggtctttgttctgtgtattccggccttttggcgtcactgacagccgaggtttccaacaaccgcgcccggtattcgccgggcgtggcatcgaaccagcgacgaaacgcacggaagaagttactcgggtcggcaaaccccagcaggtaggcgatttccagcaaggtcatgctcggctgcgccaggtattgctcggcgagttcgcgacgggtgtcgtcgagcagggtctggaagctggtgccctcctcctgtagccgccgctgcaaggtgcgttgtgacaggtgcaacgtctgcgccaccacttcacgcttgggctcgccctggggcaacagccggcacagcacttgccgcgccttgtgggtcacgcggctttccgagaaacgcgccaggtattcaccggcaaatcgatcatgcaacagcgccatggcctcgttggccgtgggcagcggcgcttccatgtcggcccgctcgaaaatcaacgcgtcgtagggtgcgttgaactccaggggtgcgtggaaggcttgtttgtagggtgccaggtccgccggctgatcaccttgcagcaccaccttgcgcggctgcagggtgcggccggtgagccagccacacagcgccagggcactggccaacgaggcttcggcgctttgccgggttggcggcaggtgatcgccatgcaccgtcagaatcagcgcatacccttcggggatcagtcggaaactcaggtcggcactttcagcgatgatgcgctggtaacgcaccaggcgcataaaaccctcggcgagggtgttgctggacatcagcgcatagcccgccacatgaaacgacgccgggcgcaccaccttgcccatgttcaggccaatcgccgggttgcccgacagctctaccgcgcgctgccataggcgggtcatgcaatcctgcgggaaccgcgcatcgggatcattcagggcggcgtagtccaggcccagttgcttgaacaaggcgcggcaatccaggccgtccatttccaatgccttgactatccccatcgcccagcttgcagaagttgttcgttcgctcatggcgtcttcttaataaagcaggctcaaacgacagccaggaagccaaggatactaaagtggcatctattgtcactggctgttactactgatcactctagactcaaataagctccccgccgaacatctgttgggcggcataaccaccaaagggccggccactgtggaaaacgtcaagcgattcaatagctttgctgagttctacccctattacctggccgagcacgccaacagtacctgccggcgcctgcatttcatcggtaccacgctggtgatcggcattctggcgtatgccatcggccggggttcgttgggcttgctgatcgccttgccgattgccggctacagctttgcctggatcggccacttcttcttcgaaaagaaccgcccggcgacctttcagcacccgttttatagcctgctgggagactttgtgatgtaccgcgacatgattctgggcaaggtgccgttctagccgaacgaccgtttaaacgatgaaagttcatccatccggcgacataaaaatctttttgtcatttgcggtgctgtatcctgccaaggctttttgagagcgcggaatcacctgcgattgaaaaaacagaccttgcgaggagcgacgacgatgcacgagatacctaatctccccttcccaagcctgcaccctacagagcagccaacaccgcagcaggccagcgacaaacagcctgaggccaaagaagccaaaccagtcgacagcaaaagccaggactgacgccgtaacagaccgtgtggaaagcgcaacgttgagcgctttccacactgcctgaatcaatcgagacgcccatcatgaccgataccctccccgacaccccggataccgccgtactcgacgctgccctgcagatggtcgaggtgtggaaccgcctcagcgcggagaaacaggccgtactgctcaagcgtttcggcacccaggaaaacgcgctggccgccctggtcaccacccaactgctggcccctgcgcgcgcctgacgtctttttgatccgaggtttttgtgttttagcgccctgcgcgaagcaaaccaccggtatcattagcagcctatctttacctgctgcgacagtggacctctcccatgcccgatatccagcgccccatggcggtcacgctgcaagttgtttccatcgtcttgttcaccttcatcggctacctgaatatcggtattcccctggccgtgttgccgggctatgtccacagtgaactgggctacggtgcggtgattgccggcctggtgatcagcgtgcaatacctggccaccctgctgagccgcccgtacgcgggcaagatcatcgacaacctgggcagcaaacgcgccgtgctgatcggcctggtcggctgtggcctgagcggcgtgttcatgctgctcgctgcgtggttctccagcctgccagccttgagcctgggcagcctgttgatcggccgcctggtgctgggcagcgcggaaagcctggtgggctcgggtgccatcggctggggcatcggccgggtcggcgcgcagaacaccgccaaggttatttcctggaacggcatcgccagctacggcgcgctggcggtcggtgctccattgggcgtcgtgttggtgaagagtttcgggctgtggagcatgggggtcagcatcatcctgctggccatcgtcggcctgctgttggcctggaacaaggtcgccgcaccgattgtggccggtgtacgcctgccgttcatgaatgtactgggccgggtcttgccccacggctgcgcgctggcactgggctcgattggatttggcaccatcgcgaccttcatcaccctgtactacaccacccagcactgggataacgcggtgtgggccttgagcttgttcggcgccagctttatcggcgcacggctgttgttcggcaacctgatcaaccggatcggcgggtttcgcgtggcgattgcctgcctgtcagtagaaatctttggtctgctgttgttgtggctcgcgccggatgccagtttggccctggccggtgcggcgttgagcgggtttggcttttccctggtgtttccggccttgggcgtggaagcggtcaacctggtgccggcgtccagccgaggctcggcggtgggcgcttactcgctgttcatcgacctgtcgctgggcatcaccggcccgctcgccggggccgtggcggcggggtttggctttgcgtcgatcttcctgttcgccgccctcgccgccttgggtggcttgctgctcagtgtttacctgtaccgacaagcgccgaaagcccgtgaggcacgcggcgactaaaagtcgaccttgccacgcccggccttgatgctgccgcgcttggtcttggattcgaggcgacgttttttcgagcccagggtcggcttggtcgggcggcgcttcttctccaccttggtagcgctgaggatcaactccaccaggcgctccagcgcatccgcgcggttctgctcctgggtccggtattgttgcgccttgagcaccagcacgccttcactggtgatgcgactgtcgcgcagcgccagcaaccgttccttgtagaagtccggcagcgacgatgcgggaatatcaaagcgcaggtgcaccgcactcgacaccttgttgacgttctgcccaccggcgccctgtgcgcgaatggccgtcagctcgatctcggcgtcgggcaggtggacgttggtggaaatcaccagcatgagcagcaggcacctctaaaggggggaagcccaaggatacgcgaatgcgccctccgccatccctccaagcaacaaacccggcacatggccgggtttgcttgatcacactttacgcttacttgaccgctggcactgccgcatccaaggctcgctgcgcactgcgtttgttcttgattgcgtaacacaccgccataaacgccacccacaccggaatcgcatacaccgacacctggatgcccggaatcatcagcatgatcaccaggatgaacaccacgaacgccaggcacacgaagttgccgtaggggtaccacaacgccttgaacagcggcacctggccagtgcggttcatgtgctggcggaacttgaagtgggagaagctgatcatcgcccagttgatcaccaacgtggccaccaccagggacatcagcagttccagcgcgtgctgcggaatcaggtagttcatcaacaccgccaccagggtgatcgccgccgaggcgaggatggaacgcaccggcacgccgcgcttgtcgatcttggccaatgccttgggcgcatcgccctgctcggccatgcccagcaacatgcggctgttgcagtaagtgccgctgttgtacaccgacagcgccgccgtcaggaccacaaagttgaggatatgcgcggcggtgttgctgcccagcattgagaacacctgcacgaacgggctgccactgtaggcgtcgccagaggcgttgagggtttcaagcaggctgtcccatggcgtcagcgacaacagcaccaccagggcaccgatgtagaaaatcaggatgcggtagatcacctggttgatcgccttcgggatcacggtgcgcggcttgtccgcctcagcagcagtgaaaccgagcatttccaggccgccgaaggagaacatgatgatcgccatggccatcaccaatccgccgacgccgtggggaaagaagccaccgtgttcccacaggttgctgaccgacgcctgcggcccgccgctgccgctgaccagcaaatagctgcccagggcgatcatgccgacgatggccaccaccttgatgatcgcgaaccagaactcggcctcaccgaacactttgacgttggccaggttgatcaggttgatcagcacgaagaacgccgcggccgaaacccaggtcggaatctccggccaccagtaatgcacgtatttgccgacggccgtcagctccgacatacccaccaggatgtacaaaatccagcagttccagcccgacaggaagccggcgaaaccgccccagtacttgtgggcaaagtggctgaaggaaccggcaaccggctcttcgacgatcatttcgccgagctggcgcatgatcatgaaggcaatgaagccgcagatggcataacccaggatcatcgacggcccggctgatttgagcaccccggccgagccgaggaacaggccggtgccgatggcgccaccgagggcgatcaactggatatgtcggtttttcaggccgcgtttcagctcgcctgaagaggaatggggtccactcatgaaaagggtctcacgcaaggtttgagaagattgattgcaggttgctgccttgaattaccgactcaagcagcgccgctcaaaccccagcgcaggcaccaggagtacagcgtctttctaacggtcatgcgtcacctgtttgtttttatctgtgacgaaatcgaacccgtccggctcgtggccaggcggagtgatcagggtgggtacaccctgaggtcttggcctttagcgtggttacgcaagggggtcacagtaaaacgcggcgcattgtacaccgctcgaccgcttggggccgcccgccaaaagcgtgtgcgacgatctgtcaggtaatccttacagcgcaagatcaaccaataatgtcgccatttacgcgtaaattaatcgttacagcatggaaaattcacgttacagccgtgatctgaataaaaaatgacggtcagaaatttcctgcaattcagcgctgccagttgtctgtttttcctcaagaaacaatcaaacaccaaaaacagaacaaaaaatccaaatgaaaccgtgtcaataaaaattttgcattttgaaacactctctcctaggttctttgcacttgcccgcgaagcccgttggcaagccgttctcaaacaccgtcctctaggagatacaccatgcaagcactggaaaacgacctggaaaccgaactgcaactcgacgactggtttgaagcgccgacccatgaggccgccgtagaaatgatgcaagccgacgctgttgtgccatttggcacagcgatgtggcccttctaaaaaccggcacgctcccggcaggtgccgtgcacggcacctgctcccttacccaaggcacagaaggacgcacgtcatggacaaggcccgcgccgtcgaacattttctctactacctcgcgcaccacccggccctcaatggcctgagccgccccaccgtgctgctgggccataccaagcgctacgacgccatcgcccagacgatcacccagggcagcgccgcccctttcaacttccaggtgcagcgcctggacctggccgccagcgacaccctggctcaggccatcgaagcctgcgacctgtacctgtttctctacgactcctccaccttgcccaaccctcgcgccgaaggcccggactttatccgtgccctgcaaggcgtgatggccgaacactggaaaaaatccctgctgttcaaggattatggcgactatttctatgacaccttcagcgtcgagccccaacgcattgccgacctcaatgccacgctgatccggcgcatgtcccaggccaacgtgctgagctttaccgacaaacatggctcacggctggaagcgccgatgagcagcatcaagaagtggaccaatatcaatggggtcggcaaccacgatctggccccgggcgagatcgccacccacagtgaggctatcaatggtcaggtgcggtttgtcggcacctttctcagcaccatcccgtttgcgcgcaaatatggtgtgctgcaatcgccgctggagttgtggatcgagaactcgaccatctgcagcgtggccagtgaagtgccggggttggccgatgatttcaacaagtacctgaatgccaacccgtcgaaccggcgtgtggaagagttggggattggtaccaatgaaggggtgaaggatctgtatgcgcgcaacgccgggttcgaggagcgccattgcgggttgcacctgggcttgggcggtgggcagaaaggcagccatcacctggatttgatctttgccagtggggtgttggcgctggatgacaagccggtgtttgatggggcctttgcgttctgagcaaagcgttaactaacgctgaaaatctgaatgtgggagggggcttgcccccgatggcagtcggtcagttgatgtgtgtggtggctgccacaccgttatcgggggcaagcccccnaagccccctcccacattttgaacgtattccaaggcaaaaaaaaacgccaacccgagggttggcgttttttatgcggcgatcaaatcactgcggcttcttgcggccaaaaccaggacgctggccggaaccggccggggcgccacggcgcttgccagacggctcgtccgcgaccagtttcgggccgggacgcttgttagcggcaggcttggctggacgcttggtgctggcgttgtcggccgggcgatccgcttcaccccggttgctgcggccacccgatggggcaggacgcggcgcacgtggcgcacgctcgccttcctgacgcgacggcgcggttgggcggcgctcaccttcgatctgcggctcacgggaaatacgaccgccggtcgccggagcattcaacgccgggcgcagggtgcgggcaacccgctcggtgcgcgccaccgggcgcgacgatttacgctgcatacgctcaagcttgtctttgctcttggcgttcatctgcggcatcgccaccggcgtcaggccgacttcggcactgaggatgtcgacttcgtactggctcatttcgcgccagcggcccatcggcaggtcggagttgaggaataccgggccgaaacgcacgcgcttcaggcggctgaccaccaggccctgggattcccacaggcgacgcacttcacggttacggccttccatcaccacgcagtggtaccagtggttgaaaccttcaccacctggcgcctgcttgatgtcggtgaacttggccgggccatcttccagcaccacgcccgccttgaggcgctcgatcatctcgtcgtcgacttcgccgcgtacacgcacggcgtactcgcggtccatctcgtaggacgggtgcatcaggcggttggccaattcaccgtcggtggtgaacatcagcaagccagtagtgttgatatccaggcgaccgatgttgatccagcggccttctttgggcttgggcatcttgtcgaacacggtcggacggccttccgggtcgtcgcgggtgcagatctcgccatcgggcttgttgtacatgatcacgcggcgcaccgattcggcggcctcttcacgcttgatgaccttgccatcgatggtgattgcgtcgtgcaggtcgacgcgctggccgagggtagcctcgacgccgttgaccttgatgcgcttctgggtgatccaggcttcgacgtcgcggcgcgagcccacgccgatacgcgccagcaccttttgcagtttttcgcctgctgggccgatttcctggctgtcgttctggtctttgtcgttcatcttaagcacctcccggtgggtcgattcaggcgtggcctgaagagtgttgaaagcggggctttggccgaatagctcggcaaagggtcgcgaatcatacgcgcatggcgcgcgttgcgcatcagagactagtcgattagtggccggcaatcggtttttccgccgaccggtgggccatgtgggatccgggtcaatcttcgaactggcgacgctcggcctcgatagcttcggccagggcccgggcttcgtcttcttcgtcgctcagcggcggctgttcgagggcggcgacggcggccaggagtttttcacgggcttcggcgacgccgaggatgtcttcttcaggttcgggctcaggttcagggtcaacggtttcctggggttctgcctcagtcgcaccatcgcgcagcaagtcatcaaagtcggtcttgatgccctgctccatgtcgtccagttccagcagcaaggtgtggaagctggtttcgtccttcggttcttccggctctgctgtcgcatcggcgagctcctgcaggctggccggcaccggggcatcgtcgaagtcgagcaccggctccgcttccatttcgcgcaattcggccagcggcggcaagtcgtcgaggtttttcaggttgaaatggtcgaggaacaccttggtggttgcaaacatcgccggtttgccgggcacgtcacggtaaccgacgatgcggatccactcgcgctccagcaacgtcttgacgatatggctgttgaccgccacgccccgcacgtcctcgatctcaccccgggtgatcggctggcgataggcgatcagcgccatggtctccagcatcgcccgagaataacgctgggggcgctcttcccacaggcgtccgacccaaggggaaaatttctcacgaatctgcaggcgataacccgacgccacttcgcgtaattcaaaagcacggccgtcgcaggatttgcgcagaatctccagcgccttcttgaacaccggcggctcgggacgttcggcctcttcaaagagctcgaacaaacgctccagggattgcggtttgcccgacgccagtaggaaagcttccagcagcggtgccagttcgcggggttcagtcagattcatcgattcagctctttattcggctcgcgcccgcacgtggatagccgcaaaaggctcattctggaccagctcgaccaacgactccttgaccagttcgaggatcgccataaacgtcaccaccacccccaggcgcccttcttcggcggtgaacagctcgacaaacggcacgaagccgccgcccttgaggcgctccagcacgtcgctcatgcgctcgcgggtggacagcgcctcgcggctgacctggtgactttcaaacatatcgccccggcgcagcacctcggccatggacatcagcaattcttccaggctcacgtccggcaacagtttgcgcgcacgggcctcgggggcatccagcttgggcaccacaacgtcgcggcccacccggctcaggccatcgatgccttcggcggcggccttgaagcgttcgtactcctgcaggcgtcggatcagttcagcgcgtgggtcgtcttcttcggcctccaccgtctccgagcgcggcagcagcatgcgcgacttgatctcggcgagcatggcagccatcaccaggtactcggcggccagctccaggcgcaccgactgcatcagctccacatagcccatgtactggcgcgtgatttccgccaccggaatatcgaggatgttgatgttctgcttgcggatcaaatacagcagcaaatccagcgggccttcgaaagcctccaggaagacttccagcgcgtccggcggaatgtacagatccaggggcatttccatgaccgcctggccgtacaccatggcaaacggcagttcctgctgggcgcccgcctggctgtcgacggtttccacggctgacattcaggcctcgaccatgaacggcgccgggtcgccgcaacccacgcggatcacttcgggttcgccgtcggccaggttgatcacggtggaagctttgccgccgccgaaaccgccgtcgatgatcaggtccacctgcttttccaggagctgacgcatttcatacggatcttccaggggatgggtgtcgccgggcatgatcaacgacacgctcatcaacggctcacccagttcttcaagcagcgccagggcaatgggatgctctggcacccgcaggccaatggtgcgcttcttcgggtgcagcagcaggcgcggcacttcgcgggtggcattcagaataaaggtgtagggccccggcgtgtgagccttgagcaggcggaaggtgccggtgtcgaccttggcgaacagccccaactgggacaggtcactgcagatcagtgcgaagttgtgcttgtcgtccaactggcgcaggcgtcttacccgctcgacggcgcccttgtcgccgatctggcaaccaatggcgtaggacgaatcggttgggtagatcaccacgccgccggcgcggatgatctcgacggcctgtttgatcaggcgcgcctgggggttttccggatgaatctggaagaattgactcacgtgttctacctgttcagacggtggcaataatggggtcatgcttgaatcgcccccacaagagcggcaaatcttccgggacggggcgatactcgccgatctcggaccagccgcctgggccatgaaaatcactgccggcactgaccagcagaccaaattcgcgggcaagaatcgccaggctgccgacctgctcggcgggttgatgcccgttgaccacttcgattgcgtggccgcccgctccaatatagtcggcaatcagcttgcggcgcttgctgcgggtgaaatcgtagtgccagggatgggccaggctgacccaggccccggaggcccgcagggtctcgacggtgtcctccagggtcggccagtgttgcttcacatcacccaacttgccggcgcccagccatttgcggaacgcttcggcgcggtcctttacaaaaccttcacgtaccatccagtcggcaaagtgcggccgcgcgggtgcgttgccgctgtcacccagttcctgctggatggcgcgggcgccttccagggcaccggacatgcctttaaggccgagcttgcggcttatttcttcggaccgcagccagcggccatcgtgcaactgggcaatggcggcgaccaaaggcggggctttttgatcaaagccgtagccgagtacatgaatggtggcgccaccccaggtgcaggacaactccacaccgttgaccagctgcatgcccaacgcatgcgcggcttcgcgggcttcgtcgaggccttcgagggtgtcgtggtcggtcaacgccaggactcgcacgcctttttcaaacgcacgcgcaaccagtaacgcaggcgccagggcgccgtcggaggccgtgctgtggcagtgcaaatcaacattcacggggatgtgtaacctcaagtcagctggcgctttcgctaccaaggatgtttgttattatgccgccacatccagcttctggctcttactgtgaaacaattcatcgacttcatcccgctgttgctgtttttcatcgttaccaagctcgaccccagggtcatcgaaatcgccggtcatgcgttctcgttcgggggcatctacagcgccaccgccgtactgatcatcagttctatcgtcgtctacggcgccatcttcatctcccagcgcaagctggaaaaaagccaatggctcaccctggtcgcgtgcctggtattcggcggcctgaccctggccttccacagcgaaaccttcctcaaatggaaagcgccggtggtgaactggctgttcgccctggtgtttatcggcagccacttcatcggtgaccgcctgttgatcaagcggatcatgggccacgcgctgaccctgccggatccggtgtggacacgcctgaacgttgcgtggatcgtgttcttcctgttctgcggcgccgccaacctgttcgtggcctttaccttccaggactactgggtcgacttcaaggtcttcggcagcctggccatgaccgtgctgttcctggtcggccagggtatctacctgtcgcgccacctgcatgacgtcgcccctaccaccccgaaaaccgaggattgacatgctctacgccatcattgccaccgacgttgccgactcgctggaaaaacgcctgagcgtgcgcccggcccatgtcgagcgcctcaagcagttgcaggccgaaggccgtatcgtgctggcgggtccacaccctgcggtagacagcaacgacccaggcgacgccggtttcaccggtagcctgatcgtcgccgagtttgcctccctggccgatgcccaggcctgggccaaggctgatccttatgtagctgccggcgtttacgccgacgtcgtgatcaagccgttcaagcaagtcctgccttgataacggccacgccgaacctaatcggttcggcgcgctcctaattgctcattattctcggtaacctgccgacaacgttctgaatattcgtgtggaatcaggagttccgatgcgcttacgtcagttgtgtctgttggcagtggtaatgatcggggctacggcccacgctgaagaaacctcgaacaccggcagttccacgcctctgtccttgagtgccggcgcccagatcaccgagttgcagcagcggttgaaagaaagcgaacgccagcgtgaagaattgagcaagcaactgcaaaacgtagatgctacccgcgaaagcgcccaactgagtcgccttcgccaagagaaccaacgcctggcccagcaactcaaagaaacacagggcggcgccttgacccgatggctgaccgagcagcaacaatggttcgtcaccggtggggccgtggcgctgatcgccttgctgtgcgggatcttcgccagcggtgggcaccgtcgccgtcgacaatggctaaattgagtgagtcatgagcgagctgttactgatagatgatgaccaggagctctgcgagctgctgaccagttggttgagccaggaaggcttccaggtacgcgcctgccatgacggtttgagcgcccgcaaagccttggccgacagtgccccggccgcagtggtactcgacgtgatgctgcccgacggcagcggcctggaactgctaaagcaattacgcaacgaccacccggagctgccggtgctgatgctgtcggcgcgcggcgaaccactggaccgcattctcggcctggaactgggtgccgacgattacctggccaagccctgcgacccacgcgagctcaccgcacgcctgcgcgccgtgctgcgccgcagccacccggccgccgtgtccacccagctcgaattgggcgacctgtgtttcagcccggtgcgcggcgtggtcagcatcgatgaacaggaattttccctcaccgtctccgaaagccgcctgctggaagccttgctacgccagcccggcgagcccttggacaaacaggaactggcgcagatcgccctgggccgcaaactgaccctttacgatcgcagcctggacatgcacgtgagcaacctgcgcaaaaagatcggcccgcacccggacggccgaccacgcatcgtggcgttgcgcagtcggggctactattacagcctttgaagcagctatcagttgccgccttccccttaccaaacctttaccctctcctgacggcggctgaccttgatctccgtaatctactcacatccggactcaccggaatagagacaggagaatcaccatgcgcaagacccttatcgctttgatgttcgccgctgccctgccgaccgttgccatggcggcaatgcccgaaggcccaggcccgatgggcggccccgaaggccatatgatgggtggcccgggtcacgacggcgaacacggtccgcgtggcaaaggcggccccttcagccaactggacctgagcaaggaacagcgccagcagatcggcaaactgatgggcgaccaatggcacgctcgcaaggacctgaccagaaagtacctggacaagctcccggctgctgaccagaaggccatgcaggacgaaatcgccgccggcaagcagaaaacccaggcggatatccgtgcgctgctcaagccagaccagcagaagaaattcgacgagatcgtcaagcagcaggaacagcgccgcgccgaatggaaggaattccaggcctggaaagcgcaacagccgcaaaaagcgcaataatgccctcgcgttaacgctcccagcccagtggcccccgccactgggcttttcctgcttgagggtttcctgtgcgttcattgttctggcgcatcctggccagtttctggctggccatcgccttggttgccgggttgtcgatcctgcttgggcatatgctcaatcaagatgcctggattctcagccgtcaccctggcctcaacaacctggccgaagagtggacccaactctacgaaacccagggtgaggacgctgcccaggagttgctgcaacagcgcaaacgccagtaccacatcgacgtgcaggtgctgaacgaaagcggcgagccggtggtgcgcggcaccttcccacgccgcgccgccgccttcgaagcccgccagaacgatagcaaggacggccacctgccctggcgccgcctgaccgctgaatacaccagtgagaagaccggcgacacttacctgttgatctaccgcatcccgcacccggaactggacgaatggcatcgcagcagcctgacatggcctttgagcgcattggtcatcgccttggtggtgctgaccctgttcagcctgttcgtcacactgtccatcacgcgccccttaagccgactgcgcggcgcagtgcatgaccttgggcaagccacctaccaacaaaacagcctggcgcaactggccaaccggcgcgatgagttcggcgtactggccaccgacttcaaccgcatgggcgcgcgcctgcaaagcctgatcggcagccagcgccagttgctgcgcgacgtgtcccacgaactgcgctcgcccctggcccgcctgcgcatcgccctggccttggctgaacgcgccagccccgaagaacgcgaaagactctggcctcgcctgacccgcgaatgtgatcgcctggaggctctgatcagcgagattctggtactggcccgcgtcgatgccgataacgccagcgccgaagaaatcgacctcaacccgttgctcaagaccctgcaaaaagacgcacagctcagcgcgccggatcaggtggtgcagctcaccaccgacaccgaactgcacctcaaggggtggccgaccatgatcgaacgggcagtggataacctgctgcgcaacgcccagcgcttcaacccgccgggccagccgatcgagctacacgcccaccttcacggcgagcatattgtgatcagcgtgcgcgaccacggccccggcgttgacgccgaacacctgagccaattgggcgaaccgttctatcgcgccccaggccagaccgcacaaggccacggtctgggcctggcgattgcccgtcgcgccgccgagcgccatggcggcaacctgttcctggccaatcatgcccaaggcggttttatcgccagtatcgatctgccgctggaacctgggattgtcacaccggcctgatcatcttctatagtggcccttctcttacggagggccgttgatgactgacctgctgactcccatccaagccgcactcgatctaccgcgcacgccgctgaccagcaccgaagccggcgccctgccctcggcctttgccgtcaccgacctggcggttgccagtatcggtgccgccggccaggccgtggcccagttgatcctgcaacagaccgggcgactgcccggcgtgagtgtggaccggcgactggcgtccttctggttctcgtcatcgattcgcccgataggctggaaaacgccaccgctgtgggacccggtggccggtgactacgcctgcgccgatggctggattcgcctgcacaccaacgcgccccatcaccgcgccgccgctgaacgggtactgggcaaggtggctgatcgcatcgcgatggccggcaaggtagccaattggaatgccgccgaactggaacaggcgattgtcgatgaaggcggttgtgccgcgcagatgcgtacctggcaagcctggcaaacccaccctcagggcctggccgtcaatgccgaggcactggtgcagcgccagaccttggcaacctccgtcgacaaaccctggctcggctcggtggcgcgtccactggcgggcctcaaggtattggacctgacccgcgtgctggccggcccggtggccagccgtttcctcgcagggctgggtgcggatgtattgcgcatcgactcaccgacctggaacgagcccggcgtagtgccggaaatgaccctgggcaaacgctgcgcccgcctggacttgaagagcgcccaaggccgcctggttttcgaaagcctgctcaaggacgccgacattgtgttccacggctaccgcgccgacgccctggaacaactgggctacagtgccagtgaactgcaaacccgcgcccccggcctgatcgacgtgagcctcaacgcctacggttggagcggcccgtggcgcaaccgccggggtttcgacagcctggtgcagatgagcagcgggattgccgccgcaggcatggcctggaaacacgcggacaaaccggtgccgctgccgttgcaggcactggatcacgccaccgggtatttgatggcggccagtgcgattcgggcattgagcgaacggttgaaaaccggccgtggcggttcggcgcggttgtcgttggcgcgtacggcgaagttgctggtggacgccgggcaggtgccggagcagccggcattgcgggccgagcaaccgagcgatcaaggcctggtagtggaacagacggcctggggccaggcgcatcgattgttgccgccggtgactatcagcggcacgccgttgcagtgggatctgccggctggggaactgggttcacaccgagcgcagtggtgactcgactatcgccatcgggggcaagccccctcccacatttttggatgttgttcacaaatcaaactgtgggagggggcttgcccccgatgaggcccgtaccgtcactatcaatccacccgttgcaacgaagtccacaaatgctgcgccgcatacgcccgcaacggccgccacgcctcggcccgcgccagcaactgccgcgccgacaccggcccgccctccaacgccgccagcgcattgatcaagccgatatcccccgacgcaaacgcatccgtctcgcgcatctggcgcatggcgatgtattgcgcggtccagtcgccaatccccggcaacgccaccagccgggccacaccatccttgaggctggccttggcttcgaacagctgagggtcatccagcaacgcctgcgcgacgccggacaaggtccgtccacgcgccttcggcatgcccagggtggccaggtccgctgccgccaatacttcggccgaggggaacacatgggtgataccgacgtacggcgtctccagcggctggccatattgcgccaccagcttgcccgctaggcgaatcgccgccaccacggtaatctgctggcccagcaccgcacgaatcgccagttccaggccatcccaggtgcccggcacgcgcaggcccggacgggccgcgaccaactgcgccatcaagggatccgtcgccaattgcgggttgatcaactggggctgcgcatccagatcgaacatcgtgcgcaggcgccgttcgatctcaggcaacgccgccgggtctggaaaacccacctcgacgtctagccaatcgccatcccccagtgccacgctgatccagccgtgctgcccgccgaggctgatactgcgccggtacacccccgcctcgaccgtctccatcccgccgatcgcccgcgccgacagaaaccccaccatcgccgcccaatcataaggcggctgatacgccagtctcacaacgacaacaccccgctgtacagcccatacgccgccagccccgcgccggtgatcacacagctgaaaatgcctttttccatgtgggtaaacaagggctggcgctgctcacgcttggcgagggcaaacaggatcacccccggtgcatacaacagcgccgacagcagcaggtacttcaagcccccggcatacagcagccacacggcgtagccgagagcgatcaggcccaccagcaagtccttcaaacgctggccgtgggcgtcttcgtaggtttcgccgcgcccgctcaacagcacggcatacgcggccgaccacaggtagggcaccaggatcatcgatgaggccaggtaaatcagggtcgtgtaggtgctgtgggaaaacagcgtgatcaccaggaagagctggatcatcacattggtcagccacaacgcgttgaccggcacttgattggcgttttccttcttcaggaacgccggcatggtcttgtcatgggccgtggcgtagaggatttccgcacaaagcagcgcccaggacagcaaggcaccgaccagtgacaccgccaggccgatgctgatcgccatcgccccccaggggccgacgatatgttccagcacgccggccagggacgggttttgcaattgcgcgagttccggctggctcatgatgcccagggacagcacattcaccagcaccaacagggccagcacgccgagaaaaccgatcagcgtggcgcggcccacgtccgagcgtttctcggcccgcgccgagtacacgctggcaccctcgatgccgataaacacaaacacggtgaccagcatcatgttgcgcacctggtccaccacgttgcccatattcgggttgcccaggccccagatatcgcgagtgaagatatccgccttgaacgccacggcggcgatcacgataaacatcagcagcggcacgatcttcgccaccgtggtgatctggttgatgaacgccgcctccttgatcccgcgcaacaccaggaaatgcacggcccacagcagcaacgaggcacagccgatcgccaccggcgtgttgccctggccgaacaccggaaaaaaatagcctagggtactgaacagcaacacgaagtaaccgacgttgcccatccacgcgctgatccagtagccccaggccgacgagaaccccatgtagtcaccgaacccggccttggcgtaggcatacacgcccgaatccagttcgggcttgcgattggccagggtctggaacacgaaggccagggtcagcatgccgaccgcggtgattgcccaaccgattaacacggcccccacctcggcgcgtgcggccatgttttgtggcaaggaaaaaatcccgccgccgatcatcgagcccaccaccagggcaatcagggcaccaagtcgcagtttctgggccggttgagacatgaacactcctaaatgaacaacaacttgagctgacaacggtgcactcggctaattaactcagcgagtgtagcgtttattagtgaaggcgataaaaccaggaggctcataacgcaatcgcatgtcaggcattcgagtttagtcttatttagaatttaaataccggattgtctgaccgttcgcgaaacgcctttcgaaatgtttgcatattcaagaatacggtctagcttaaaacctccatagcgctgactaaatgattaaccaaaaggaaagaatggctctgcgtcaatactttccgaggattcttatcgcccacgagtttccagcctaagtcattaattcacaatggaatgtgccaatgaagtgatctgagtcagctgtttgattagcgcacggatttattctgtggtctctcttctcctgcattggagttatgcgatgtctgaatctcccggaaaacttcgactgggcgcactggttgcacttgtcgtgggctcgatgattggcggcgggatcttttcactgccgcaaaacatggccgccagtgccgatgtcggcgcggtattgattggttgggtgattaccgccatcggcatgttgaccctcgcctttgtgttccagaccctcgccaaccgcaagcccgacctcgacggtggcgtatacgcctacgccaaggccggtttcggcgactacatgggtttctcgtccgcctggggttactggatcagtgcgtggctgggcaatgtcggttacttcgtgttgctgttcagcaccctgggttacttcttccccattttcggcgaaggcaacacgccggctgcggtgatcggcgcctcggtgctgctgtgggccgtgcacttcctggtactgcgcgggatcaaggaagcggcgttcatcaacctggtgaccaccgtcgccaaggtcgtgccgctggtgctgttcgtgctgattgcgctgttcgccttcaagctggagatcttcaccgctgacatctggggcgtgaaaaaccccgacctgggcagtgtaatgaaccaggtgcgcaacatgatgctggtcaccgtctgggtgttcatcggcatcgaaggcgcgagcatcttctcgtcccgtgcggaaaaacgctccgacgtcggcaaggccaccgtgatcggctttatcaccgtgctgctgttcctgatgctggtgaacgtgctgtccctggggatcatgacccagccggagctcgccaagttgcagaacccgtcgatggccgccgtgctggagcatgtggtgggccactggggcgcggtgctgatcagcgtcggcttgatcatctcgctgctgggggcgctgctgtcgtgggtgctgctgtgtgcggagatcatgttcgccgccgccaaggaccacaccatgccggagttcctgcgcaaggagaacgccaaccacgtaccggccaacgccctgtggctgaccaacgccatggtgcagatattcctggtgatcacgctgttttccgccagcacctacctgtcgctgatctacctcgccacctcgatgatcctggtgccctacctgtggtcggcggcctacgcgttgctgctggcggtgcgcggcgagacctatgaaaacgccctgcgcgaacgcaagaaagacctgttcatcggcgccatcgccctgatctacgcggtctggctgctctacgccggcggcaccaaatacctgctgctctccgccctgctctacgcccccggcgcgatcctgttcgccaaggccaagcatgaactgggcaaaccgattttcaccaacgtcgagaagctgattttcgccgcagtagtcattggcgccctggtggcggcctatgggctctacgacggcttcctgactctgtaattctgactggaggatctgtaatgaccacggaaaaagtgaagtacggcgtacattccgaagccggcaaactgcgcaaagtcatggtgtgctccccaggtttggcccaccagcggctgacccccaacaactgcgatgaactgctgttcgatgacgtgctgtgggtggcccaggccaagcgcgaccacttcgacttcgtgaccaagatgcgcgagcgggacattgatgtgctggaaatgcacaacctgctcaccgacatcgtcgccatccccgaagcgctggactggatcctgaagcgcaagatcaccgccaacacggttggcctgggcctggtcgacgaagtcagctcctggctgcgcagcctggagccacgcaaggccgccgagttcctcatcggtggcgtctcggccgatgacctgccgagccaattcggcggcaagaccatcgaaatgttccgtgacttcctcggccatgccagcttcatcctgccgccgctgcccaacacccagttcacccgcgacaccacctgctggatctacggcggcgtgacgctcaacccgatgtactggccggcgcgacgccaggaaaccctgctggcctcggccatctacaagttccaccccgagttcaccaacgccgacttccagatctggtacggcgaccccgaccaggagcacggcgccgccaccctggaaggcggcgacgtgatgccgattggcaacggcgtggtcttgatcggcatgggcgagcgctcgtcccaccaggccatcggtcaactggcgcgcaacctgttcaagaacaaggcggtggaacgcgtgatcgtcgccggcctgccgaaatcccgcgcggcgatgcacctggacaccgtgttcagcttctgcgaccgcgacctggtgaccatcttccccgaagtggtcaaccagatcgtgcccttcaccctgcgcccggatgaaagcaagccacacggcatcgacatccaacgcgagaaaaccaacttcctcgaaaccgtcgccgcagccctcaacctcaaggcactgcgtgtggtcgagaccggcggcaacagcttcgccgccgagcgcgaacaatgggatgacggcaacaacgtggtggcggtagagcctggcgtggtgatcggttacgaccgcaacacctacaccaacaccctgctacgcaaggccggggtggaagtcatcactatcagcgccggtgagctcggccggggccgtggcggcggccactgcatgacctgcccgatcatccgcgacccaatcgactactaaggagactccatcatggctttcaacatgcgcaaccgcagcctgctgtcgctgatgcaccacaccacccgcgagctgcactacctgctggacctgtcccgcgacctcaagcgcgccaaatacaccggcaccgagcgtccgcacctgcaaggcaagaacatcgcgctgatcttcgaaaaaacctcgacccgcacccgctgcgccttcgaagtcgccgcccatgaccagggcgcccacgtcacctacatcgacccggtgtcgtcgcagatcggccacaaggaaagcatgaaagacaccgcccgcgtgctcgggcgcatgtttgatgcgatcgagtaccgtggcttcgagcaggaaatcgtcgaagagctggccaagttcgccggcgtgccggtgttcaacggcctcaccgccgaattccacccgacccaaatgatcgccgacaccctgaccatgcgcgagcacagcgacaagccgctgcatgacatcagctacgcctacctgggggatgcgcgctacaacatgggcaattcgctgctgatgatcggcgccaagctgggcatggacgtgcgcatcggcgcacccaaagcgctgtggccgcacgcggacttcatcaagcaatgccaggcgtttgccgaagaaagcggcgcacgcatcaccatcaccgaagacccgaaggaagcagtgaaaggcgtggacttcatccacaccgatatctgggtgtccatgggcgagccggtggaagcgtgggacgagcgcatcgagcaactgctgccgtaccaggtcaacgccaagatgatgaaagcctcgggcaacccacgggtgaaattcatgcactgcctgccggcgttccacaacagcgaaaccaaggtgggcaaggacatcgccgcgcggtacccgaacctggccaatggcgtggaagtgaccgaagaggtgttcgagtcgccggccaacatcgcgtttgagcaggcggaaaaccgcatgcataccatcaaggcgattctggtgtcggcactcgcagatatctaaaaaatgtgggagggggcttgcccccgatagcggtacatcagtaataaaagtgctggctgaaacaccgcaatcgggggcaagccccctcccacactaaccgcgttcacaacgatgaatttcatcagaaggacattctttatgcgcatcgtcgtagccctgggcggcaacgccctgctccgccgtggtgaacccatgaccgcggacaaccaacgcgccaatatccgcatcgccaccgaacagatcgccaagatccatgccggcaacgagctggtgatcgcccacggcaatggcccgcaagtcggcctgctgtcgttgcaggcagcggcctacacccaggtctcgccatacccgctggacgtgctcggcgccgaaaccgaaggcatgatcggctacatcatcgaacaggaactgggcaacctgctggacttcgaagtgcccttcgctaccctgctcacccaagtggaagtggacgccaaggaccccgccttcaagaacccgaccaagcccatcggcccggtgtattccaaggccgaagcggagaaactcgccgccgaaaaaggctgggccattgcgccggatggtgacaagtaccgtcgcgtggtcgccagcccacggcccaaacgcatctttgaaatccgcccgatcaagtggctgctggaaaaaagcgccatcgtcatctgcgccggcggcggtggcatcccgacgatgtatggggaagacggcaagctgcgcgggattgaggccgtgatcgacaaagacttgtgttcttcgttgctggcctcgcaactggaggccgatctgctggtgatcgccaccgacgtcaacgcggccttcatcgactacggcaagcctacccagaaggccatcggccaggcccaccccgacgaaatggaaaagctcggcttcgccgccggttccatggggcccaaggtccaagcggcctgcgagttcgcccgcaagactggcaaaaccgccgtcatcggttcactctcggacatcgaagccatcgtccagggcagtgccggtacacgcatcagtacggcaacacctggcatcacctatctgtgaagtagaggagagacgcctatggccacctttgaacccggtcacttacatgttgaacgtcacgcactgaatgcccaggactacagctacaacctgtgcatcgactacgaagtcagccaggacccaaaggaaggcaagggcatgctgttcaagctgcatggctcggtgcagggcaaggacctcaaggaagagttcttcctgcccaaggaccaggcattcgactttgcgcggcatgcgatgaacatcgcgcagaagtatgggatgccgaaagtcgcggtgttgaacggctcgatgcacaagcagtacgacttgatgttcgaggatgtgcggcatcaactggatgtgaaggccggggacccgatcaagccggaacacctggaataactggcacaactctgctccaactgtgggagggggcttgcccccgatagcggtgcatcagttacaaattggctgactgacacaccactatcgggggcaagcccctcccacattttgatctccaccctctgcaaggcatacttgctgcctctcgcgtcccagaattgtcagcagccccatgcgtatccacgtcagcttcatcgaccgcgtcggcatcacccaggaagtcctggccctgctcggtgggcgcaatctcaacctggatgcggtggagatggtgccacccaacgtctacatcgacgcaccgaccctcagcgccgaggtgctcgaagagctgcgcgatgcgctgttcagcgtgcacggcgtgcaggcggtgaccgtggtggacatcctccccggccaacgccgccacctgcaactcgacgccctgctggccgccatgaccgacccggtgctggcgctggacagcgcgggcaagatcctgctggccaacccggcgctgatcgccctgtacggccgcgaaccggccggcgaaagcatcagcgagctgtttaatgacccggcgctgctcgacaccttgctggaacacggctttcgcttgccgctgcgcgagatcagcgtcaacggccagaccctgctgctggacgccacgccgatcaccgacgcgggcgccttgctcaccctgtatcaacccaaccgcatcggcgaacaactgtcggcgctgcaccatgaccatgccgaagggtttgatgcgctgcttggcgagtccccggtgatccgcaccctcaaggcgcgtgcgcagcgggtggcggcgctggatgcgccgctgttgatccagggcgagacgggcaccggcaaagaactggtggcgcgtgcctgccacgccatcagtgcccgccacagtgcgccgttcctggccttgaactgcgcggcgctgccggaaaacctcgccgaaagcgaactgttcggctatgcgcccggcgcctttaccggcgcgcaacgcggtggcaagccaggcctgatggaactggctaaccagggcacggtgttcctcgatgaaatcggcgagatgtcgccgtacctgcaggccaagctgctgcgttttctcaatgacggcagcttccgacgcgttggcggcgaccgtgaagtgaaggtcaatgtgcgcatcctcagcgccacccaccgcgacctggagaagatggtcagcgaaggcaccttccgcgaagacctgttctaccgcctcaacgtgctcaacgtcgaagtgccgcccctgcgtgcacgcggccaggacatcctgctgctcgcccgctatttcatgcagcaggcctgtgcgcagatccagcgtccggtttgccgcctggcgcccggcacttacccggcgctgctgggcaaccgctggccaggcaacgtgcggcagttgcagaacgtgatcttccgcgccgccgccatctgcgaaagcagcctggtggatatcggcgacctcgacatcgccggcacctcggtggcgcgccagagcgacggcgaaatcgacagcctggaacaggcggtggaagacttcgagcgcaacctgctggaaacgctctacaccagctacccctcgactcgacaactggccagccggttgcagacgtcccatacggcgattgcccatcgtctgcgtaagtacggcattcccaacaagccttgagtgacatggttaaaaatgtcggagcgcattgcaatgttggtctgagaacgacatcgcgtgtactgaaagcgctacagcgtaacgatatcgctacaatcctgttttttgcgcgccatgcaaggctttgatccacataggctttttttcacaggcccaactgtagcgaaatcgctacaggcaaaatgcatatcgtcataaccaattttatcaagtcattgagttatataggattaatgacgttggccgcgatattgctaagcaactccccattattccaatcccgtccaccagacgaatctggccctgaggagtttccatgagcgagttgcgtttcactgaagatcacgaatggctgcgcgccgaagctgacggcagcgtcaccgtgggtatcaccgctttcgcgcagaacgcgctgggtgatgtggttttcgtgcaactgccggagttgcaggcctacgacaagggcgccgaggcgtccaccgtggaatcggtcaaggccgccagcggcgtgtacatgccgctggacggggaagtcctcgaagtgaacgacaagctcgacggcagcccggaactggtcaacgaagacccgatgggcgaaggttggttcttccgctttaaaccggccgatgccggggcagtcgctaaactgttggatcaggacgcgtacgatcgcctgatcaaagccaacgctgaagcttgaggagcgcgccatgaccgttaatctcaccaccgccaacgaattcatcgcccgccacatcggcccgcgccaggaagatgagcagcagatgctcgccagcctgggttttgactccctggaagccctgagcgccagcgtgatcccggaaagcatcaagggcaccagcgtgctcggcctggaagacggcctgagcgaagccgaagccctggccaagatcaaggccatcgccggcaagaaccaactgttcaagacctacatcggccagggctactacaactgccacacgccgtcgccaatcctgcgcaacctcctggaaaacccggcctggtacaccgcctacaccccgtaccaacccgagatttcccaaggccgcctggaagcgctgctgaacttccagaccctgatcagcgacctcaccggcctgccgatcgccaacgcctccctgctcgacgaagccaccgccgccgccgaagccatgaccttctgcaagcgcctgagcaagaacaagggcagcaacgccttcttcgcctcgatccacagtcacccgcagaccctcgacgtgctgcgcacccgtgccgagccgctgggcatcgacgtggtggtgggcgatgagcgcgaactgagcgacgtcagcccattcttcggcgccctgctgcaatacccggccagcaacggtgacgtgttcgactaccgcgaactgacggagcgcttccacgccgccaatgccctggtggccgtggccgccgacctgctggccctgaccctgctgaccccgccgggtgagttcggcgccgacgtggccatcggcagcgcgcaacgcttcggcgtgccgctgggctttggtggcccgcacgcggcgtacttctccaccaaggatgcgttcaagcgcgacatgccgggccgtctggtcggcgtgtccgtcgaccgtttcggcaagccggccctgcgcctggccatgcagacccgcgagcaacatatccgccgcgagaaagccacgtcgaacatctgcaccgcccaggtattgctggccaacatcgccagcatgtacgccgtgtaccacggccccaagggcctgacccagatcgcccgacgtgtgcaccagttgaccgcgatcctggccaagggcctgactgccctgggccagaacgtcgagcaaacccacttcttcgacaccattaccctgaacaccggcgccaacactgccgccctgcacgaaaaggcccgtgcccagagcatcaacctgcgcgtcgtggacggcgagcatcttggtgtgtcggtggacgaaaccaccacccaggccgatatcgaaaccctgtgggcgatcttcgccgacggcaaggccctgccggacttcgctgccaaggttgaaagcaccctgccgaccgccctgctgcgtcagtcgcctgtgctcagccacccggtattcaaccgctaccactccgaaaccgagctgatgcgctacctgcgcaaactggccgacaaggacctggcgctggaccgcaccatgatcccgctgggctcgtgcaccatgaagctcaacgccgccagcgaaatgatcccggtgacctgggccgagttcggtgccctgcacccgttcgccccggccgaacaaagcgccggctacctgcaactgacgtccgaactggaagcgatgctctgcgcggctaccggctacgacgcgatctcgttgcaaccgaacgccggttcccagggtgagtacgccggcctcctggccatccgtgcctaccaccagagccgtggcgaagaacgccgcgacatctgcctgatcccgtcgtcagcccacggcaccaacccggcaaccgccaacatggccggcatgcgcgtggtcgtcaccgcgtgcgacgcccgtggcaacgtcgacatcgaagacctgcgcgccaaggccatcgagcaccgcgagcacctcgccgcgctgatgatcacctacccatcgacccacggtgtgttcgaagaaggcatccgcgaaatctgcggcatcattcacgacaacggcggccaggtgtacatcgacggcgccaacatgaacgccatggttggcctgtgcgccccaggcaagttcggtggcgacgtgtcccacctgaacctgcacaagaccttctgcatcccccacggcggtggcggcccgggcgtcggtccgattggcgtcaagtcgcacctcacaccgttcctgcctggccacgcggccatggaacgcaaggaaggcgcggtgtgcgcagcgccgttcggcagcgcaagcatcctcccgatcacctggatgtacatcagcatgatgggcggtgcgggcctcaagcgcgcttcgcaattggcgatcctgaatgccaactacatttcccgtcgcctggaagagcactacccggtgctgtacaccggcagcaacggcctggtagcccacgaatgcatcctggatctgcgcccgctgaaggacagcagcggcatcagcgtggatgacgtggccaagcgcctgatcgacttcggcttccatgcgccgaccatgtcgttcccagtggccggcaccttgatgatcgagccgaccgaaagcgaatccaaggaggaactggaccgtttctgcaacgccatgatcgccatccgcgaagaaatccgcgcagtggagaacggcacgctggacaaggacgacaacccgctgaaaaacgccccgcacaccgccgccgaactggtgagtgagtggacccacccctacacccgcgaacaggcggtgtatccagtgccatcgttgatcgaaggcaagtactggccgccggtggggcgtgtcgacaacgtgtttggtgaccgtaatctggtgtgtgcgtgcccgtcgatcgagagctacgcataaccaaaggatgcattgggtacaaatgtgggagggggcttgcccccgaatgcggtgcatcagccacagataagctgactgacacaccgtcatcgggggcaagccccctcccacactagatcgagtcaactttcagaaaataataagaaaccggagaacaaccatgtcccttagcgtgttcgacctgttcaagattggcattggcccctccagctcccacaccgtcggcccgatgcgtgcggccgctcgattcgtcgagggtctcaagcgtgaccacctgctgggcgccaccacctgcgtcaaggtggaactctatgggtcgctgggcgccaccggcaaaggccacggcagcgacaaagccgtactgctgggcctggaaggcgaacacccggacaccgtgaataccgaaaccgtggcaacacgcctggcgcagatgcgcaaggacggccacctgaacctgctcggtgaacaccgcattgcgttcaacgagaaagaacacctggcgatgattcgcaaacccctcgcctaccatcccaacggcatgatttttcgtgccttcgacgccgcccacatccagatccgcagccgcgagtactactcggtcggcggtggttttgtggtggacgaagacgccgccggcgccgaccggattgtcgaagacgccacgcccctgaccttcccgttcaagcacgccaaggacttgctgagccattgcaccacttacgggctgtccatcagccaggtgatgctgaccaatgaaagcgcctggcgcccggaagcggaaacccgcgccggtttgctgaaaatctggcaggtgatgcaggactgcgtggacgccggttgtcgcaacgaagggattctgcccggtggattgaaggtcaagcggcgcgcggcggccctgcatcgccagctgtgcaaaaacccggagtcggcgttgcgcgacccgctgtcggtgctcgattgggtcaacctctacgccctggcggtcaacgaagaaaacgccaacggcgggcgcgtggtcacggcgcccaccaatggtgcggccgggatcgtgccggcggtgctgcattactacatgcgttttatccctggcgcgaatgaggacggcgtagtgcgcttcctgctcaccgcggccgccatcggcattctgtacaaagaaaacgcctcgatctccggcgccgaagtcggctgccagggcgaggtcggcgtggcctgttccatggccgccggtgcgttgtgcgaagtattgggcggcagcgtgtcccaggtggaaaacgccgccgaaatcggcatggagcacaacctcggcttgacctgcgacccgatcggcggactggtgcaggtgccctgcatcgagcgtaacgccatgggctcggtcaaggcgatcaacgcagtgcgcatggccttgcgcggcgatgggcagcactttgtgtccctcgacaaggtcatccgcaccatgcgccagaccggcgccgacatgaaaagcaaatacaaggaaaccgcccgtggcggtttggcggtcaacattatcgagtgctgacgcctaaaagcgcgccagcacgtttttcaggagctgaatatgtccaccaaaaccctgttgaaaacccctctgcacgccctgcacctcgaactgggcgcacgcatggtgcccttcgccggctacgacatgccagtgcaatacccgctgggcgtgatgaaggaacacctgcacacccgtgatcaagccggcttgttcgatgtgtcccacatgggccagatccgcctcaccggtgccaacgccgccaaggccctggaaaccctggtgccggtcgacatcatcgatctgccggtgggcatgcagcgttacgcgatgttcaccaatgaccagggcggcattctcgatgacctgatggtggcgaacctgggtaacgacgaactgttcctggtggtcaatgcggcctgcaaggaccaggacctggcgcacctgcgccagcatatcggcgaccagtgcaccatcgagccgctgttcgaagagcgtgcattgctggcgctgcagggcccggcggcagtcaaggtactggcgcgcctggcaccggaagtgaccaagatgaccttcatgcaattcgcttccctgcgcctgctgggcgtggactgctatgtcagccgttcgggctacaccggtgaggacggcttcgaaatctccgtgcctgccgccaaggcggaaagcctggcgcgcagcctgctggccgagaccgaagtacaggccatcggcctgggcgcccgcgactcgttgcgcctggaagccggcctgtgcctctacggccacgacatgaataccgacaccaccccgatcgaggccagcctgttgtgggctatctcgaaggcccgccgtgccgacggtgcgcgtgccggtggctttcccggtgccgacaccatcttcacccagcagcaagccggcgtgagccgcaaacgtgtaggcctgctgccacaggagcgtacgcccgtgcgtgaaggcgcggaaattgtcgacgcagacggcaccgtgatcggcagcgtgtgcagcggcggtttcggcccgaccctcggcggcccgctggccatgggttacctggacagcgcattcatcgcactggataccgaagtctctgcgttggtgcgtgggaaaaaggtgccacttcgtgtaagtaaaatgccatttgtgccacaacgttactatcgtggctgattgactgtttctataagtaacgcgattgcgttaacgtgcactaatctgtaacgcaatcgccataaaacagtgcacttccgatagtcttttatagagggatcaacctataacaagtgaccaactctatcgaataagtcagttccacactgttcaacaaagtgtcatgagccccagcaaaacctgggcttttggcagggcttgttttttctctattagttggcgtagagtttgcccactgtgtttgcatgggtcgcttggaacctggacctgggcagtagctgaagaagtccgctacaacccgttcgacgtctcttactttcctgcaacccagcccagtactctttcatgcgaaaggggctgtcattaatttttagcgtcaaggaaataagaaaatggctgaacgtcagagcggtaccgtcaagtggtttaacgacgagaaagggtttggttttatcactccagaaagcggtccggatctgttcgtgcatttccgcgctattcagggcaacggcttcaagagcctgaaagaaggccagaaagtgacattcgttgctgtgcaaggccagaaaggcatgcaggctgacgaagtactggcagaaaaccactgagttcttctgcgacaaaaagcccctgatggtgacatcaggggcttttttatgtgcatttgctcgtaaaatggctttttttcataagagagccctgccatgtcgaaacccctgctgagcccccaaggcgaattccccgccgttggcctgggccgtcgcctggcagcgatgttctatgatttcctgctatgcaccgcactgctgatcgtcacagcgtttatctacaagctgatctggatcgcgtttgtcggtgaagccaggatgcgcaccctcaccgaatccggcgcgctggatggcgacccgttgttatcgacgattctgttgtttgtgctgtttggctttttcgccaagttctggacccattccgggcagaccctgggcatgcaggtgtggggcgtacgcgtacagaacgctgacggctcgcggatcagcctgtggcaggcgctgttgcgcttcgtggtgtcgattgcgtcgtggttgtgcgtggggctggggtttatctggtcgctgtttgataagcgcaaacgcagctggcatgacatctattcggacacgcagttggtgcggattcccaagcagaagaagtagccttctacctattggatatcaaaatgtgggagggggcttgcccccgatagcagtgtgtcagtcacaggtgtattaactgatccactgctatcgggggcaagccccctcccacattttttaccgcgttcgactatgcgttaccggcccgcttcagccgcgccgcctgggtgaaatccaacatgcgcttgagcggacgcactgcctgcgggattaccgacggttcgacgaatatctcgttactgccctcacgcagacactgcaacgtgcgttccagcgtgttcatcgccatccacgggcagtgcgcgcaactacggcacgccgcgccgttaccggcggtaggcgcttcgacgaagaccttgtccgggcacagctgctgcatcttgtaaaagatgccgcggtcggtggcgacgataaacgtcttgttcggcaggcgctgggccgccgcaatcagctggctggtagaacccacggcatccgccagttcgatcaccgaggtcggcgactccggatgcaccagaatggctgcatccgggtaaagcgccttcatgtcttccaactgcttggatttgaattcttcgtggacgatgcaggcaccgtcccacagcaacatatcggcaccggtctggcgctggatgtatgtgcccaggtgcttgtctggcccccagatgattgtctcgccgttgtccatcaggctttcgacgatttccagcgcgcagcttgacgtcaccacccaatccgcccgggctttgaccgccgccgaggtgttggcatacaccaccacggtgcgttcgggatgctggtcgcagaacgccgaaaactcatcgactgggcagcccaggtccagggagcaggtggcttccagggtgggcatgaggatgcgcttttcaggcgtgaggatcttggcagtctcgcccatgaaacgtacgccagcgaccaagactgtcttggccgggtgagcggcgccgaagcgggccatttccaaggagtcggagacacagccaccggtttcttcggccagggcctggataaccggatcacagtagaagtgggcaaccagcaccgcatcctgagccttgagctcggcggcgatggcagtgcgcaggctcgcctcttcatcggcgctgagggccttgggctgcttggcgtcgaggtgggcttgaaccagaaggcgttcggaaatttgcgtcatgttcgcaagacctgcaggcgcagttgcgcgaaagtcgagtgtaccaccggctctggagcccttcgggcaccgccggacgaagtgattgtgttcatcaagcacgggttaaggtgaagctcggcaaggctacagaatatcgaatggtttcaaaagcctaatctggtactcgcctgcgccttcgtggagcaaaaaaaaggaaaccccgcttggggtttcctgcgtttaccgccggttgttcatcaaaaacggtaagtcaccgaaccaccaaacccgttggcgctgttttcatacttcgcatcgtaggtcaggccaacctgggaaaggttctgccgcaccttgatcggctcttccttgaggtaggaatacgccacatcgaaggtcaggttatcgacgggcgtccagccggcacccaggctgaaaacggtgcggtcccccgtgggaatccgcacggagcggtcggtgttgttggtaggcgtctggtccaccgagagaccggtccgcagtacgagttctttgttgacccgataggccgcaccgatcgcgtgagaccaggtgtcatgccagtgctgctgctctgtgatggcgcccaggccaccgaattgagcagtgaggtcggagactccatcgttattgatggtgatctttttcaactgactccagcgggtataggtgctgccaaggtacaaggtccagtcgtcattcagttgatgggttaccgagaaatccaccgatgacggcgtggtcacgtccaggctggcgtcatacttctgcggcccaccgtcgaaggcatcggaaatcaagccggaggcatgggtcttgccgctgaggtggtagaccacctgcgagtggtaggtcacaccgatgcgcgtgctctcaagaggctgcatcaggagaccggcgttgaacccggtagcgttgtcgtcacctttgactttcacactttcgccggcgccgccacccagcggcacattggaatccagctcgccactgatgcggttgaaggtcgggccaaagcccaccgacactttatcgttgaaggcatagctgaccgtcggttgcacggtgatgacctggaccttgctcttgttgccaaagccattgccctggaagctgtgttcatagtcggtcaccaggccgaacggcgcgtagatgcccaggccgaatgcccagtgctcatcaatgggcgtgaccaggtagcccatcggcacggcaatgccgggcaccatatcgcccttgttggtgcctgggttgtcggcaccgaactgcgaggaactggcgtccttgatgttggatttggcatcgaggtaagtcgcaccgaggctgacttcattctgcttcagacgcgacatgccggcggggttgccgaacaccgtgctggcgtcttcggccgaggaggaacgaccggcgtagcccgtacccattgaactgatgctttgttcattgagcgcgaaaccaccggcgaacaacggggttgaggcaagggaaacggcaagcgccaaggcgcctttaagagttttgttattcattattaggactcgaattatggggcagcgatggggaagctaccaacgttcgagcgaggggtttatgaagagtttttcatgcactgaattgtcggacaattctatgcatttcaatgactttagctgttttttcgtttccagcaatgaccttttcacccgaatctgaccagccggttttaaccacggattggctatggctcagatataaaaaaccccaagcgcttcatacgcttggggcattcggtgtgttcaaacaggcaaaaaaaaacccggaaatcctcacttgcgtgggccttccggattttctaaaccgccaaaaatggtgggtcgtgtgggattcgaacctacgaccaattggttaaaagccaactgctctaccaactgagctaacgacccgctgtgtggtggcgcgtataatactgatttctaaggattattcaacaccttatttgaaataaatcagaaataacgcgttgggtcagtaattccggcggcttggaagccttctgcacgcagtcggcagctgtcgcatttcccacaagcacggccgtcatcgtctgcctggtagcaggaaacagtcagcgaataatcgacgccaagtcctacacctgccttcacaatgtcggccttgctgaggttttgcagcggcgccaggatacggaagccctgcccttctacaccggcctttgtcgccaggttggccatgcgctcgaatgactcgacgaattctgggcggcagtccgggtagccggaataatccaccgcattgactccgataaagatatcgcgggcgttgagcacttctgcccagcccagggcgagggacaggaacacggtattacgcgctggtacgtaagtcaccgggatgccttcgccgggggtttccggcacatcgatgctgctgtcagtgagggccgagccgccgatgccattgaggttcaaaccgataaccttgtgctcgaccacccccatgtcacgggcaacgcgggcagcagcgttcagctcggcgcgatggcgctggccgtagtcgaaactcatggtgtagcaggcataaccttcagcttgcgccatcgccaccacggttgccgagtccaggccaccggacagcaggattaccgcgcgtttttgatcaatcattggttcagtcatttcagcgtcctggctcgtcgttccaaaggtatttatgcagttgcaattgcagacggactggcaggttatcagccaccacccagtcggcaaggtcgcgcgcgttcagatcatggtggcttggcgagaacaatacttcgcctgcgcggcgatcaaggccgtactgaatcagcttggagttcgcccagtcgtagtcatcgcgcgaacagataacgaacttgacctgatcgttggccgtcagcaattcgatgttctcgtagcgattgcggtgcgcttccttggagccgggggtcttgagatccaccacgcggcttacacgcggatcgaccgccgagatatccagcgcgccactggtttccagggagacctcgtaaccggcgtcacacagctgcttgagtaatgggatggcattgggctgggccagcggctcaccaccggtcacgcagacgtagcgcggcttgtagccggcaacctgttccaggatgtcatcgagggtgcgcaccgtgccgccactgaaggcgtaggcgctatcgcagtactggcaacgcaaggggcaaccggtcagacgcacaaatactgtgggcaggccggccgttcgcgtttcaccctgcaacgagtaaaaaacttcggtaatacgtaatgtgtcttgcatagtcgccacgggcgtaacagctaaacaggctgtccgcctccgtcaggcactttaagggaccccgccaacgcgtagaccccaaaaagcgtgtttcataaaagggcgtggattctaacgaaaaaacccgcgccaggcgcgggtttcttctaaacgggcaaacgtcgcttacaagcgctgcagatcccgttgggccaactgggcagcggaagtccccggatactgggccaccacctgttgcagaatgcctttgaccttgtcggtatgacccaggcggcgttctacgtcagcgagtttgtacagcgagtccggcaccttggcgtgcttggggtacagctggctgaccttggcaaatgcctggcccgcgccctgtagatcaccctttgccaggttgacttcacctaaccagtactgggcgttgcccgcgtattggctgttcgggtatttgcgcaggaaagcggtaaaggcctggctggccttgtcgaaatccttggctttgatcaggtcgaaggctgcatcgtaatacagcttttccttcgccggatcacccggttcgctgctcgcggcaggggcttggctggcagccgcccctgctgctgcaccggcagcagcgctaggcgcgccaccggcagaagaattatcaggagttgcggcaggttgaacgccggctccaatacgttgatcaagatccttgtaacgctccaggccttcttgcttgagctggttcacctggttttgcagtacctcaatagcgccttgctgctgcgcgatttgatcctgcatgcgttgcagctggttgaacagttcgccctgtgccgagggagcggacgtagccgctccccccgcataggcgccgttcgtgccataacccgctggcggataactgctcccgctattgttatagccagagttgctatcttccacaggaaccgcagcccacaccgcaagcggtgcgaggctgagagccaatacagtcagagcacgacggcacgttcgcatgacgaattacttacgcagttcgacgcgacggttttgagcccaggactgctcgtcgtggccagtagcaactggacgctctttaccgtaggaaaccagttccagttggcctggagcaacaccttgcagtaccaggtagcgctgaacggctttcgcacgacgctcgcccagtgccatgttgtactcacgagtaccacgttcgtcagtgttaccttccagaacaacgcgagcgccgttagctttcaggtccttcgcgtgaacgtccagagcgcgcatggcttctggtttcaggtccgaactgtcgtattcgaagtagaaagtggtgatagcgcgcagagcagcttcttcgctcagggagccgtcaaccgcaccagtgttagcgccgtaaccagcgtttggatcaacagctgcgccttcaccggcattgtcgccgcctttagacgagcaaccaacggctacggacagagccagagccagagcagcaaacttaccaaacttcagcatttccatcgtgaaactcctaatgaaccccagtgtgttaagcaaatctttttgtagcgccgcgtcagttcaggtaaggggaccaggatggttctctgacttcgccttgtgcggtaggaagtgggagccttacgcgtccattaatggacacgagcatcaagactccccggccctgctggcgggtggcgtagattaccatggtgccgttgggcgcaacagtggctgactcatcaaggttggtatctgtaaggatttttacggttccgcgctgcaaatcctgggccgcaacccggaaattagtgaaaccatcctgacggtgaatcatcaccaacgtcttttcatcagccgaaagtttagggttggcgttgtagttaccgataaaagtaacccgttctgcaccgccaccattcacgttcgccttatagacctgtggcttgccgcctcggtcagaggtgaagtagatggtcgaaccatccttgccccagaacggttcggtattgatacccggaccgctggttgcacgagtgatctggcgcgtggccatgttcatcacgtagatgtccgggttgccgtctttggacaacacgaacgccaggcgcgaaccatccggtgaccacgctggcgcaccgttgaggccttcgaagttggtgatctgctcacgacggccagtatcaatgtgctggacgaagatacgcggacgcttctgctcgaaagacacgtaggcaatgcgcttgccgtccggcgcaaaacgcggcgacaggattggctcacgggattgcagcaaggttacagcgcgcgcaccgtcgtagtccgaacgctgcaaggtgtagcgagtgttgtccaccgagaaacgctcagccgttacgtacagcaggcgcgtcgagaaagcccccttgatgccggtgagcttttcaaacgactggtccgaaatgtagtgggccatgtcgcggatctgctcggcagtgcccgagacgctgccggtcaggacctgctgctcggtcgccacgttgaacaaggtgtaggtgatttgcaggcgaccgccggccggcgtgatgttgccgaccatcaggtactgcgcacccaccgctttccaatcacggaacacgacttcgctggcctggtttggctggctgatcatgttgccttttggaatgggcgcgtagtaaccggagttgcgcaggtcgtcactgacgatctgggccatgtcgtccggcagcacgctgccgccctgccagccgaacggtactaccgcgatcggggtggcccggtcgctaccgctggtgaccaggatgttcttttcatccgccgccgctatccctgccatacagcaaataacgacaagcattcctcgaagaaggtttctcacaaggctagatcctcaggtgtgaatgtcatcttgaatgaacgatagggagcgaagtcacttggtttcattccctgcatctcggtcaaccggccaatgttcttgactgcggcaaccgccgaactgtcgaacgaaccgtcaccactggacttggccacgctgaccgaagtcaccgtaccgtccggcaacatgccgatctgcagcactaccgtcatgcctttgcgcgccgaaggtggacgagtccagccttctgctgcccgcgcccgaatcaggtcatcgaaactgcccgcgacttcatcaccacgttcatcggccaaggcttgctgacgctgcggcgtgtcggagagcaaatctgccaaggcctgggccttcttctcttcggcggacttgcgcgctgcttcctgggcctttttcttctgggcgtcggcggcagctttcttcttcgcgtcgtcggcgacttttttcttcgcctcgtctgcttcagcttttttcttggcgtcttcggcggcttttttcttcgcgtcttcgactattttcttcttggcgtcttcagcggcctttttcttggcctcttcttcggcagccttcttggcttcttcttcagatttcttcttggctatatcagccaattgtttctcttcggcctttttcgcttcggcagctttctcggctttcttggcttcatcagcctttttcgcctcgtcagccttcttggcttcatcagcctttttcgattcctcggccttttgagccgcctcttctttcttttgttccgcagccgccttcaccgcttcctgctcgaccttcttctgttccatctgttcgacttcagtctggcgtgcagccgacttctgggcctcacctgcaatcttctgattggtctgggtggtggcctggcttttcgatttcagctgatacagggtcgcctgcacgatcggcttggctggcggcaggtccggggtcatggcaaagctgacgaacagcatgccaaacaccaggacgtgcagggcaatcgcccagacgctaggccagaagaagctttccgaggcggacggctctcgctgttgctgcatcagggcgcctcggtaatcaagccaacgttacccacgccggccttctgcagcccgcccatggcgcccatgacagagccgtagtcgaccgatttgtcgccacggatgaacacctgggtgtgcttgccgccttcgttgccggagcgaatgatcttggtcaccgcatcggtcatcgccggcaaggtgagagccttgtcttgctgcttctgcgtgtcgacttcgctgccaaggttccagtaataggtcttgtcagccttgatcgaaatggtcaggacttgagtgttgttgtcttgcggcaaggcttcactggaaaccttgggcaaatcaaccttcacgccctggttgagcatcggcgcggtcaccatgaagataaccagcagcaccagcatcacgtcgatgtaaggcactacgttcatctcggcgaccggcttgcgctttttgcgagctcgagcgattaaagccattgggaattacctgcttattcttcgctggtgtgcactttacggtgcaggatcgcctggaactcatcggcgaaggtgtagtaacggccgatcaacgtttcgctggtggcagcgaagcggttgtaggcgattactgcggggatagcggcaaacaggccgatcgccgtggcgatcaaggcttcggcgatacccggggccacggtggccagggtcgcttgctgggcctgggccaggccacggaaggagttcatgatcccccacacggtaccgaacaggccgatgtatgggctgacggaaccgacggtggcaaggaacggcaggctttgctcaagcttttcttcttcgcgggaaatggcgacgcgcatggcacgggccacaccttccatcaccgcttccgggtcaacgcctggctgctggcgcagacgggagaattccttgaagccggcgcggaagatctgctcgacgcccgaatccgggtccgggttgctgccagcctggcggtacagcttggacaggtcgatacccgaccagaagcgctcttcaaagctctccagggcacgtcgaccagcacgcagcaggttgctacgctgaaaaatcatgacccaagaggtaaccgatgcggctaccagggtcagcatgaccagttgaaccacaacactggcattgctgaccaggctccacatggaggaatggtcgacgacggtaggttccacgctaaatctcctgctttgattgtttacccgcgccgcttacgtcggcaaaggccgcacgtagagcttcgggaatggcccggggtttcaaactattggtgcgcacacaggccaccaggaactgcccctcacagagcagcgttgcatccgttgcccgcctgacctgctgcttgaaacgcaggctgacacggttcaattcgattacttcagcgctgaccaacagctcgtcgtccagccgcgccggcgcgtgataccgcgcctcgctggagtgcacgacgaataacaggtcctcgcctgccagctcggattgggcaaagcccagctcccgtagccgctcggttcgagcccgctccatgaacttgaggtagttgacgtaatacacgatgccgccggcatcggtgtcctcgtaataaacgcgacagcgatgtgcgaacgactgatccccgttttgcgcgcgcatactctagtgcttactcctcaggttgccaatccggctgggcaactgttttttcattgtctgaaacttttctaccgactgaatgacgacaccagccactaggacagcacaaacctcggataaatcgtctggcgtgaagcttttaatcgtccactgcatcgagaaattcgtctactacaggcatctcgcccaatcgtgacggaatgtttaacccaaagtgcagataggcgtggcgcgtcaccaccctgccccttggggtacgcatgatgtaaccctgctgaatcaggtacggctccagcacgtcctcaatggtatggcgctcttcactgatcgccgccgccagactatcgacacccaccggccctccgtcgaacttctcgatcatggtcaagagtagacgccgatcctggtgatcgaagccatgctcgtccacatccagcaggttcaaagccaggtcggccacggccttggtgatatgccccttggcccgcacctcggcaaaatcccgcacgcgacgcagcaaacggttggcgatccgtggcgtgccgcgggctcgacgggaaatttcaaacgcgccttccgggtccagcggcaggccgagaatattcgccgaacggctgacaatggtcgccaggtcagccgtgctatagaactctagacgttgaacaatgccgaaacggtctcgcagcgggttggtcaacatgcccgcacgggtcgtggcaccgaccagcgtgaacggcggcaggtcgagcttgatcgagcgcgccgccgggccttcgccgatcatgatgtcgagctggaagtcttccatggccgggtacagcacttcttcgacgatcggcgagagccggtggatctcgtcgataaacagcacatcgtggggttcaaggttggtcagtaatgcggccagatcccccggacgctccagcaccggaccggaggtggacttgatcgacacgcccatttcctgagcaataatattcgccagcgtggtcttgcccaaccctggcgggccgaagatcaacgtgtgatccagggactcattgcgcccgcgtgcagcctggataaacaactccatctgctcgcgcacggtgggctggccgatgtactcggccaggctcaggggccggatggcgcggtcctggacctcttcacggtcgcgcgggccggtggctgcaatcagacgatcagcttcaatcacttaaatcattcccttcagggcgcggcggatcatgtcttcactgctcaggttcttgtccttgatggccgatacggccttgctggcttcctgcggtttgtaacccagggaaatcagcgcgctgactgcatcgctctcggcactcgccacctggccggccggcatgtccggctggttcgggacgagggcaaacatgctcggtacgacttcccaggccttgaagcggtccttgagctccaccagcaggcgctcggcggtcttcttgccaacgcctggcaccttggtcagcgccgaggtgtcctgggccgaaacggcacgcaccagctcatccacttccaggctcgacatcagagccagggccagtttcggccccacgccattcaggcggatcagctcacggaagaagtcgcggtcacgcttgccaataaaaccatagagcaattgcgcatcttcgcgcaccaccaggtgggtgtgcagcgtaatcggctcaccgaccgacggtaggcgatacagggtggtcatgggtacttccagctcataccccaacccatttacatccagaatcaggtgcggcggctgtttttcagccagggtgccgcgcaagcgtccaatcacggttcagatccttaaagctagggtcagagcaaggcccgaccggaaaacgattgcgctgatgctatcagagacgcaggcgcccgccacgactgcgtgccgtgcccaggccgtggggcagcaagcttgagcgggtgtgcgcatgacaaatggcaatagccagggcgtccgaggcgtcgatctgcggcttggcggtgagcttgagcatgtgcatgaccatcatctgcacctgctctttgttggctgccccggtgccgaccacggcctgcttgacctgggtcgcagtgtattcggcgatctccatgccctcctcggcgcccgccacgatggcagcgccgcgggcctggccaagcttcaacgcggagtcggcattctttgccatgaacaccttctcgatgcccatggtcaccggcccgtaggtctggatcacttcacgcacgccgcgatagacgatctgcaggcgctcggccaactcgcccgcaccggtgcggatgcagcccgaagccacatacacgcagccacgcggggtctgttgcaccacgccaaaaccggtaatgcgcgaaccggggtcgatacctaggattaaagtcataacgcctgcgggttgggtaaacacaatttttcatacagagactaaccaatgtgggagggggcttgcccccgatggcnnnnnnnnnnnnnnnnnnnnnnnnnnnnnnnnnnngccatcgggggcaagccccctcccacatttaaaactacatcgcccttcagcctagctgttcggcgacagactctgggatatccgcattcgaataaacgttctgcacatcatccaggtcttcgagcatatccagcatcttcagcactttctgcgcgccatccaggtccagctcggcgctggtggtcggcagcatcacgatttccgcgtcagtacctttgaaaccggccgcttccagggcattacgcacggcgtagaagctggcgaacgaggtgaacacgtcgatggagccatcttcgttggtcaccacgtcatcggcatcggcttccatggccgcttccatcagcgcgtcttcatcggtgcccggtgcgaaagagatctgccccttgcgctcgaacaggtaggccaccgaaccgtcagtaccgaggttgccaccacatttgctgaatgcgtggcgcacggcggcggcagtacggttgcggttgtcggtcatgcactcgaccatcaccgccacaccgcccgggccatagccttcgtagctcagctcgaccatgtcgtcggtatcggccgcaccggcaccacgggccacggcacggtcgatgatgtcacgactcatgttggcacccagggccttgtccagcgccaggcgcagacgcgggttggagcctgggtcacccccaccctggcgggccgcgacggtcagctcgcggatccatttagtgaaaatcttgcctttcttggcatcctgacgctctttgcggtgcttgatgttcgcccacttggaatggccagccataacacaactccaaaaattctctagaaaccttatcaattccgccccaggcagaatgcaacccttgtaacgcaaaggcgcatccgaagatgcgcctttttagactgcgtaaacctcagtgcgctttcacgcagcagccttactcagccttcggcgtctcgcgcagacggatgtgcagctcgcgcagtgccttggcatccaccacacctggagcctgggtcatgacgtccgcagcgctctgggttttcgggaaggcgatcacttcacggatcgactgggcgccggtcatcagcatcaccagacggtccaggccgaacgccaagccaccgtgcggcggcgcgccgtatttcagggcgtcgagcaggaagccgaacttctcttcctgttccgcttcgttgatgcccaacaggcggaagaccgcttgctgcatctctttgcggtggatacggatcgaaccgccacccagttcggtgccgttgagcaccatgtcataggcccgggacagcgcgccagccgggttggcttccagctcggccggcgagcacttcggcgcggtgaacgggtggtgcaaggcgctgaagctgccgtcgtcgttctcttcgaacatcgggaagtcaacgacccacatcggagcccattcgcaggtcagcaggttcaagtcgtgacccagcttgatgcgcagtgcgcccagggcttcgctgacgatcttggccttgtcggcgccgaagaacacgatgtcaccgtcgactgcaccgacgcgatcgaggatcgcgttcaggttgtccagcggaatgtttttaacgatcggcgattgcaggccgtcaacgccattggcgcgctcgttgaccttgatgtacgccaggcccttggcaccatagatgccgacgaacttggtgtagtcgtcgatctgcttgcgcggcatgctcgcgccgcctggcacgcgcagggcggcgatgcggcatttagggtcgttggccgggccgctgaacaccttgaagtcgacttctttgagttggtcggccacgtccaccagttccagcgggttacgcaggtctggcttgtcggagccgtagcggcgcatggcttcttcgaaggtcatgtgcgggaagtcgccgaactccaggtccagcacttccttgaacaggttgcggatcatctgttcggtcaggcccatgatttctttttcatcgaggaagctggtctcgatgtcgatctgggtgaattcaggctggcggtcagcgcgcaggtcttcgtcgcggaagcacttagcgatctggtagtagcggtcgaagccggcgaccatcagcagttgcttgaacagctgaggcgattgcggcagggcgaagaacgaaccggcgtgggtacggctaggcaccaggtagtcacgcgcgccttccggggtggcccgggtcaggatcggcgtttctacgtccaggaaaccgttttcgtcaaggaaacgacggatgctggtggtcatgcgcgaacgcaggcgcagcttctcggccatttccggacgacgcaggtccaggaagcgatagcgcaggcgggtctcttcgcccacgtcagagtattcgttgagtgggaacggcggggtttccgactcgttcagcacttccagctcatagcccagcacttcgatgccgccggacgccatgttcttgttcacggcacccgccggacgcaggcgaaccttgccggtgatcttcacaacgtattcgctgcgcacgcggtcggcggcggcgaagcttgcggcgcgatccgggtcgaacaccacttgggccagaccatcacgatcacggatatcgaggaagatcaccccgccgtggtcgcggcgacggtgaacccatccgcaaagggtgatttcctgaccttccagggtctcgttcagttggccgcaataatggctgcgcatcatggtagtggtttcacttctcgtaattcgaaattcggtggaggcctgcctcgtcaccggacattaaagcaggggacggataatgcaggagcctgcgcgtagagttcaactcagtctgctttgtcgccgccggccaggttcttcttcgagccggtcttgaaatcggtctcgtaccagccattgccgctcaagcggaagcccggcatggacaacatcttcttgagttccggtgcctggcaggctgggcaatcgaccagcggcgctgcgctgatcttctgaatggcttccaactgatgaccgcaggaagcacattggtagtcgtacatgggcatggcgatgtctcggcgatcagaacgttactgcgccacgcctgccctacggatccgcagcatgcgtagcaaagcgcgggattatatccggtaaatcgaggcagcgcagccggcattctgcccggggccctgcccgccatgatagagggccggccccgaagcccggtggctataccggtgaacaggcgggttcagcacgccctttcaggacgtgcaccacacaaaccaccctgaccaacccactgaagttcttcaccccgccataacgcaagtgcacttcccgatcgacataagacagcaacgcactgactgagcaggcattgatcctggcgatttccgtgaggatattccaatagatctgctccagccgcaggcacgtggaaaatccattgagccttaccgatcgggacagcggcttggccagtcccatatcgaacccttttgcaaacgggtcgatctttatcttatgaaaaccaccggtttccatcactccattacccactccgcgtgacatacacctgacactccattgccaaacaaccgcccatgggtactcccattgggcaatggccctataaaacagcagggagcggcgggcaaccagaagacgcggagttgatcggcgtaggacaacgccaggaaatgcgcggaaacaagcgagcggcgccagggcgacgccactcaaggccagcgtttactgattttcaagcagggaacgcagcatccacgcagttttctcatgcacctgcatacgctgggtcagcaggtcagccgtcggctcatcgctgaccttgtcgagcagcgggaagataccgcgcgcggtgcgggtgaccgcttcctggccagccaccagttgcttgatcatctcttcggcgctgggcacgccttcttcttccttgatggaagaaagacgggcatagatggagtaggcacccggcgccgggaaccccagggcacggatacgctcggcaatggagtccacggccagggccagctcgttgtactgctcttcgaacatcaagtgcagcgtgcggaacatgggacccgtgacgttccaatggaagttgtgggttttcagatacagaacataggtatcggaaagcagtcgcgaaagcccgtcgacgatggatttacgatcttcttcactgataccgatatcgattgccatgtttatccccttcaattgacaagcattcattgatcaggtgcaggaccactctagcaagagtgccggtgatgcgcagcccggcgcggcaattcgccccggtgcgccctgtcgaccggcacaacccaagcctttgaggcaagtaggaaatttctctgctggccgtttgaaaaaactgcacgcgtctaggacaagcgtttgctgcagaaatgccatcgcccttgcaataccccgaaatgcttgatttgagtaggcacagcctttgctgttaaatagatggcgtgtcgccgccgttactttctgcggcagcggcataggctgataccccgcgcacgtgcccaacgcctcccattgttcagaagcgaaccgtgccagtcagctcttccttgtgatccgtcttaacgtgagttaatcaaaatgttgaaaatcgtccacctgctaacgggcgttgcagctttgctgctgtcctttatcccgagcctgcagcctgaaagcctgccgtatctggaacaacacgacgctctgtacctggccatgttcggccttcttaacctgacgctggcaccggtgatcccttactggaacaaaggcccacgtcatcaactgcaaaacctggtcagcgcgctgctggtactgaccgttgtcgtacaaaccctcaccctcctggcacccatgcctgaagtcggcggccacccggccatcctgctcagcctggtgattgctgtggtcgccatcgttcttcacctggccatcagcttctaccgttcgtcccctgcggcctcgtcgcaaacctacgacatgaccaatcgggataccggtaccgtcaagtggttcaacacatccaaaggcttcggctttatttcccgtgattcgggcgacgatatcttcgtccacttccgggccattcgcggcgaaggccatcgcgtcctggtggaaggccagcgcgtggagttctccgtgatgaatcgcgacaaaggcctgcaggccgaagacgtgatcgctgcactgccgcgtcgctgataccggctttcgcagcaaaaaaaaccgcgatccagcttggctgggtcgcggtttttttatgcgcggctattaatagtgaggcggcggcgcttcttcttcggaggtttcgaactggccgcccatttcttcctggcgtttgagcagcgcagtcatctgcagttgcaggcgttctaccgcacgctgctgggtgacgaggatgtcattgagggtctcgatggtgtcgtcctggaaggccaggcggctttccaagtcggtgacgcggtcttgcagatccatgattcagccctggttaaatatgaagtcggcgggcaacagctcgcgcagacgggcgcggatggcagcgacttgctcatcggtgtaaggctgcgccggatgtttgccccataccggcgccggccaggcagcatcgtcgcgcttgcgcacgatcacatgcacgtgcaactggctgaccacattgcccagggcgccgatgttcatcttgtcggcggccaagccttcattcagcaactgggccaaggccgtcgtctcttgccacaaacgctgctggtcggcgacatccagttgaaacacttcgctgatagcgttgatgcgtggcaccaggatgaaccacgggtagttcgagtcattggacagcagcaggcggcacagcgggaagtccccgatgaccagtgtgtcttgttgtaggcgttgatctagggcgaacaccgcgggcactccgttcggcaagtcaggttcaggcgcccagcataccttcgaatgcgcccggcttcacggcgaatgcaggaaagcgccggcgccaatgatgaaaaagcatgcactctttcgaggcgggcgaatatttgagctacgctaaaccgggcctcaccgggacgcaccaaaatgacccacttgtgcttcaaagggatccgccaattacccactcatgggggtgaaccggtaacgtttttccctcgcacaggttttatgcaccaccgaagaggggtaacaccgccgcgtcaagcccaaaccaaacggcgtaaaaagcccgtgcttatgcggtttttacacgcccgcaagggttttcacgaaaaaatgacattcggttaccgctttgtgcacgcttgttgcattgacacctgcatcgtcggcaacgacacctgaatggaagcaggtgtttcgcgaaaaaaaaacagcagcgtttcaatgcgtatcaaggaagtgttcaaactttgaaaagggtttggaaacagtattgaagttgtcagtccggttacaacaggactgtgaatttgcgacatggagctagcaatttacgacagcctcgtaaagaagctgaaaggatagatgggtaagtatcgtcaatagggtctgcgtgatataactttgcgccgacacataaaagaaagagccgcccagataaaaatacaggtgggacggcagtactcttcctaaaaccaaaggagcaaatcacgatgcgcgtgatgaagtggagcatgatcgccctggctgtttcagcaggcactacgcagttcgcaatggcgtccgcccaaagcgattccaaaggctttgttgaagacagcactttcagcattaatactcgcgctctgtacttcagccgcgacttccgcaacaacccgtcgggcccaggctcccagagccgtgccgaagaaaccggcctgggcttcaatgccctgtacgaatcgggcttcactcaaggcaccatcggtgtcggtgttgatgtgattggcctgttgggcgtcaagctcgacagcggcaagggccgtgcgggtaccggtctattcccaacgggttccgacggtcgctcgcaagacgactactccaaaggcggcggtgccgttaagttccgtatctccaatacggtcctgaaagtcggtgaccagtacactacggctcctgtgttcgcctctgacgacagccgtttgctgccagagctgccacaaggtatctcgatcaccagtaacgagatcaagggcctgaaactggaaggcggtcacttcacttccagcattgcgcagaaccagacctatcacgacagccttggcttgaccaaaaccgattttgtcggtggtgtctactcgttcacgcctgagttcaccggcagcctgtactacgcgaagaccgaagattacttccgcaagtactacagcaacctgaactggacccacgcactgagcgacgaccagtctttcgccttggacttcaacatctacgacaccaagagcgagggcgaaggcctgcaacgtgcttccaaagacagcgctctgccgttcgcacaacgcaccaagctcgacaaccgtgcgttcagcttgcagggtgcttacaccatcggtgctcacacctttactctggccgcccagaaagtcaccggcgacggcgactacggctacggcgtagacggcggcggcacggtattcctggccaactccatcgcccgttccgacttcaacgccgaaggcgagaagtcctaccaggctcggtacgatatcaacatggcgacctttggcattcctggccttagcttcatgactcgttatgtcaccggtagcggcgccaacactgccaccacttcgaacggtaaagagtgggaacgtgatatcgaagccaagtacgtggtacagagcggcccagcgaaaaacctgagcctgcgtctgcgtcaagccacctatcgttcgggtgatggcgtttactacggttcgccttcgatcgacgaactgcgtctgatcgcgaactacccgctgaacatcttgtaactgctcgttcgattacaacgatggcttaaggcttcggccttaaataaaaagccgccccccttgcaaacaagagggggcggcttttttattaccgtttaatttcaatcgaaaaataactagcaagctaactaacgagattaacccgtcgaccgtgaacctgaccttttggccaagttcaatgccattgaccttagttacttcgtaacactttcctgcatcacccgaataacccgctgcggaaatggaatatcaatccccgccgcttttaaacggtcacgtgccagttcgttcaacatgaacaccacatcccaataatccgcggtcttggtccagcaacgcagggaaacggtgatcgaactgtcacccaaagtcgaaaccaccgccacggcagccggatcggccagtacacgtggatcttttgccagctccagcagcacttcacgggctttctgcaggtcagcttcatagtccacacccacatcaaacaccaccttgcgggtcggctgacggttggtgttggtgattaggccgttggacaggctgccgttagggatgatcacggtcttgttgtcgccggtgcgcagcacggtatggaagatctggatgctgtcgacggtacccgaggtgccttgggcttcgatccagtcaccaatgcggaacgggcggaacagcagaatcagcacgccgccggcgaagttcgccaggctgccttgcaaagccaggccaatggccagggtcgcggcaccaattgcggccacgaacgaggtggttgccacgccgatcatcgaggccacgttgaccaccagcatgactttgagcgcgatgttcgccaggctggtgatgaagtgttgcagggccaggtcagcattgcgcagtgccagcaaacggcccactcgatgggtcaacacgttgatcagccaccaaccgatggccagggtgaccactgccagcaaaaaccggctgccgtattccatgatcatcggcagccacgactctgaggtcttgatcaagtgatccacttcagcattgaaatccatctacattctcctggttaccggatgttcggcgtatcgagtggccataaatgcaattgagccccgaagggctcaatagtaggcgcaggttgtggggcgtgggacgtcaaaaacgcccgcaggttccccaatgtgccatcagtcgcggaagttattgaactgcagcggcatgtcgaaggtcttggcgcgcagggccgcgatggcttcttgcaggtcgtcacgcttcttgccggtgacgcgaacctgctcaccctggatcgcggcctggactttcagcttggcgtccttgatgtgggcgacgattttcttcgccagctccttgtcgatgccttccttgaggatggcttcctgcttcatcagcttgccggaggcgtaggcgtccttgatttcaaggcattgcgcgtcgatcttgcgcttgaccagcgacagcttgaggatctcgatcatcgcttccagctggaaatcggcttcagcggtcaggttgacggtcagctctttttccttgaactcgaagctgcccttgcctttcaagtcatagcgacggtccagctccttgacggcgttttcgacggcgttggtgacttcgtgtttgtccagttcggataccacgtcgaacgaaggcatgtcatatctccaatataaggggcgggctcagtagagatggagcgcgcccaagctaaaatgccggggcattatagcggttcttttgtcccgttcgctgcgggcgaccctacggagcaaaaactgatgtcgaccacctggcatattctcggcgccggcagcctgggcacactttgggcgactcgcctggcgcgtgctggcgtgcccgtgcggttgatcctgcgcgatgaagcgcgcctggccaactatcagacagccaaggggctgaccttggtggaacaaggtgtagaacacacttacccggtgacaggcgaaacatccgacagtcctgggctgattcatcgcctgctggtggcgtgcaaagcctacgacgctcaagcagccgtcgcacagttgcaacatcgactggcgcccgatgccgaactgatcctgctgcagaacggcctcggcagccaggacgcagtcgccgcgcaactgccccaggcccgctgcatcttcgcctccagcaccgaaggcgcgtttcgcgacggcgactggcgcgtggtgttcgccggccatggctacacctggctgggcgatgcaggccacccaaccccgccgctgtggctggaggatttgcaagccgccggcatcccccacgactggagcaccgatatcctcacgcggctctggcgcaagctggcgctcaattgcgccatcaacccgctgaccgtgctgtatcagtgccgcaatggcgagctacaggcccaccagtgcgaagtcgccaccctgtgcgccgaactcggcgaactgctggaatgctgtggccagcccgccgccgcgctggacctgcaacacgaggtggaacgggtgatccaggccaccgccgccaactactcctccatgtaccaggacgtggccgcaggccgccgcaccgaaatcagctacctattgggctatgcttgccaggcggccgcccgtcaccaactgaacctgccgcaccttcaacagctgcaagtgcgcctggtcgagcagttgcttgcacgcggattgccccgcgactgagccacgcgctaccctgcccgcctgtctatcacctgggaaaaccctgatgccgctgcgccagcgtcttgaaaacctaccggtcgggcagaaactgctggccgccctgctggtgctgttgaccaccgtactgctggtggccaacctgacctttatcagcgccgcctactggatctcccaggaaagcatggcgccccaggccttgcaggccatcggccgcctggtgtccaaccctgcgctcgccgccgaggccctcgaatcgccggccaaggccgacgcattgctcaatgagttgaccagctattcgccgttgcgcgccgccgctctgtacgacggcgacggcaaccgcctggcgcagatgcaacacggcgaccgcctgcacctgcccgatgactaccggcacatcgaggcctggcgtgtcaccgagtttcgcagcaaccaggtcatcaccctgccccgcgccggccaaccgtccgggcatttgctgctggtggccagcagtgagctaccagtggcgttctacaccggcacattgactgccagcctgggcatcctgattttcagcgtactgttgtggctggtcatcgcccgtcagatcaaacgcctgatcacgcggccgatccacgaactggaagaactgtcgcgccaggtcactcgcgaagagaactacgccctgcgcgccggtcgtggcaaccacgatgaaataggcagcctggccgaagccttcaacacaatgctgtcgcgcatcgaagcccgcgagcaacagctcaagcgcgcacgggacgactcccaggcggcctacgaccaggcccagggcctggccgaagagacgcgccacaccaaccgcaagctggaactggaagtccaggtccgtagcaagatcgagaagaaactcaccggtttccagaattacctgaacagcatcatcgactcgatgccctcggcattgatcgccctggatgaacagctctacgtcacccaatggaaccaggaagccagcgccctctccggcacacgcttggatgaagctttgaaccagccgatctacctggccttccagccgctcaagccttacttgccgcagatcagggcagcggtcgaacaacacacggtggagcgcatcgaacgcgtcaactggttcaaggatgacgaacccaaacactacgccctgaccttctacccgctgatgggcggtgccggacgtggcgtggtaatccgtatcgatgacatcacccagcgcctgtccctggaagaaatgatggtgcagtcggagaagatgctttccgtcggcggcctggccgccggcatggcccacgagatcaacaacccgctgggggcgatcctgcataacgtgcagaacatccgccgccgcttgtcgcctgacttgccgaagaacctggaacacgcggaacaggtgggtatcgagttggagaccgtcaaccgctacctgcaaagccgcgaagtgccgcaactgctcgatggcatccagcaggccggggcgcgggcggcgaagatcgtcacccatatgctcagtttcagtcgccgcagcaaccgacagatggcaccttgcgacttgccggcattgatcgaccaggcggtggagattgccggtaacgatttcgacctggccatcggctttgacttcaagggccaggcgatcatccgccagttcgacccgcaactgggtccggtgccaggcaccgccaacgaactcgaacaggtcctgctcaacctgctgaaaaacgcggcccaggccattcacctgcgggaagacgacagcgaaccggggcgcatcatcctgcgtacgcgcctcaacccgccgtgggcggagatccaggtggaagacaacggcatcggcatgagtgaaaacgtgcgcaaacgcaccttcgagccgttcttcaccaccaaggaaatcggccagggcaccgggctagggctgtcggtgtcgtatttcatcatcaccaataaccacaagggccagatggaagtgcactccaccctcggccagggcacctgctttaccttgcgcttacccctggccggcagccaactgccgccttacgaactcacccaactggagcaatgaccatgggctttcgcctgtcgaagatctacacccgtaccggcgacaaaggcgaaaccggcctgggcgacggccgccgtgtgcccaaggatcacccacgggtggaggccatcggtgaggtggatacgctgaacagccagttgggattgttactggccaatcttgaagaacagagcggcaaacatccggaactgaaggatgtgatcgaggtgcttacgccgtgccagcatcgcttgttcgacctggggggcgagttggcgatgccagtgtacaaggcgctgaatgcggcggaagtggatcggctggaagcagcaattgatcgctggaatgaagaagtgggatcgctagagaacttcatcctgcccggtggctcggcgttgatcgcccaggcccacgtgtgccgcagcctcgcgcgcagtgcagagcggcggtgccagcagttgaatgcggtcgagccgttggaaggcgtggggttggcgtacatcaatcggttatcggacttgttgtttgtggcggcgcgggtaattgcaaggcgccagggcgttgctgaggttttatggcaggctgccgctaaaccccactgattattcagcgcctgatctgacgccttcgcgagcaagcccgctcccacatttgaccgcattccaacggtagaactcggtcgaatgtgggagggggcttgcccccgataaggccggtcagaacagcctcaaatctcaggccagaacgcgcgaatccctgccacaccttgggccccagcctcccaagccttctcccgctcggcgggtccaaccccgcccaacagaaacaccggcttgctgaacccggcgatcaacgccgctacctgctcccagcccaacggctgcgcatcaggatgggtctgggtcggctgcaccggcgacagcgtgacaaaatccacgtccatcatttctgccagtgccaactcctcagcgttatggcaggaagcagccagccagcgatccttcggcagcggacgccccttgctggcgtacttacgcagttgcgccgaggtcatgtgccaaccggccgcaggaaaatcccccagccattcaaacggccccttgagcatcaactgggccttgcccgcgcacaggcccaccgcatccaccgcaaggtcgcggtatttggggtcgtagccgttgggcgcacgcagttgtaccaacttgatgccgccagcaatggctttctggataccccgcagtaacgtcggggtttccagttcgcccggggtgatcaggtactcggcaggcaagcgcgcagccgcaacgatcggcgcgttggccgccgggaactcgtagttgagcagctcccgaggcgccacccattccagcggttgcccttcggcgccatggggctcaccggtaaacgccgagacttcccagacatccagcaacacctgtttgtccggatagtcatgctgcaccttgatcagcggccgcgccgtggtgacctcgatgcccagctcttcctgcaattcgcgggacagcgcgccggcgaccgattcatcggcttccaccttgcccccggggaattcccagaggccgccctggtgctgggtatcggcgcggcgcgccagcaggattttgccgtcgacaccgcggatcaccgctgctgctacatgcactcgtttcaccgcgcttatcctcttaggtacggtattccgcgttgatcttcacgtactcgtgggacaggtcggtggtccagatggtttcgctgcactcgccgcgacccaactcgatacggatggtgatttcttcctgctgcatcaccgccgaaccctgggcttcggtgtaggtttcggcacgggcgccacggctggcgatgcacacgtcgccgaggaacacgtcgatcttgctcacatccaggtctggcacaccggcacgaccaacggccgccaggatacggccccagttcgggtcagaggcgaacagcgcagtcttgatcagtggcgagtgagccacggtgtaacccacgtccaggcattcctggtggttgccgccgccgttgacttcaaccgtgacgaacttggtggcaccctcgccgtcacgcacgatggcctgggccacgtccatgcacacttcgaataccgcctgcttcaacgcggcgaacaacgggccgctggcctcggtgatttccggcaggttggcctggccggtagcgatcagcatgcagcagtcgttggtcgaggtgtcgccatcgatggtgatgcggttgaacgacttgttggcaccgtccaggatcaggctgtgcagcacgtcgcgggagactttggcatcggtagcgatgtagccgagcatggtggccatgttcggacggatcatgcccgcgcccttgctgataccggtcacggtgacagtcacgccatcgtgcacgaactggcggcttgcgccttttggcagggtgtcggtggtcatgatgccggtggcggcggcggcccagttatccacagacaggtcgtccagcgcggcttgcagcgcgccttcgattttctcgaccggcaacggctcaccgatcacaccggtggaatacggcaggacctggctggcgtccacgccggtcagttgggccagcttggcgcaggtgcgcgcagccgccaccaggccaggctcgccggtgccggcattggcgttgccggtgttggtcagcaggtagcggatcgtaccggccacgcgttgcttggccagaatcaccggcgcagcgcagaacgcgttgagggtaaacacaccggcgacggtcgagccttcggcgcaacgcatcacgactacatccttgcgcccagggcgcttgatgccggccgaagcgataccgagttcaaaaccggcaaccgggtgcaacgtgggcaaaggaccaagaccaacagccatgaatgcgctccttaaaaatgggtgatgtctgtgccgtcgtgagcgacggtgaaattaatggcaaaacgccgcgacggcaggagccggtcgcggcgcagggtgttgcagcgtcaggcgaaaatcttattcgatctggccgtggcagtgtttgaacttcttgcccgagccgcaatagcacagctcgttgcggcccagcttctgttcgttgcgcaccgggctttgagccagggccacatcgacctcctcacccaatacctcaggcgcttccaggcctggcgcttcgtcgtgctggaactgcatgcgcgcagccagtgcctcggcttcctgacgcaggcgagcttcttcctcgatcgggtcttcgcgacgcacctgaacgtgggacagcacgcggatggaatcgcgcttgatcgaatccagcagctcggagaacagcgtgaacgactcgcgcttgtactcctgcttcgggttcttctgggcgtaaccccgcaggtggatgccgtgacgcaggtggtccatggtcgacaggtggtctttccacaggtcgtccagcacgcgcagaacgatttgcttctcgaaggtgcgcagtgcttcggcactcgcctgctcttctttctcgttgtacgcggccagcaattcggccatcagtttttcacgcagggtttcttcgtacaggtggtcgtcttcgtccagccactgctggactggcaagtcgacaccgaagtcgctcttcaacgccgcttccaggccggcaacatcccactgctctggcaaggactgtggcggaatgtgtgcgctgacggtggcgttgagcacgtcctgacggaagtcggcgatggtctcgccaatgttgtcggcggccagcaacgtgttacgcatgtgatagatcactttacgctgttcgttgttgacgtcatcgaactcgagcagttgcttacgaatatcgaagttgcggccttcaaccttgcgctgggccttctcgatggcgttggtcaccatgcggtgctcgatcgcttcgccggactgcatgcccagggccttcatgaagttcttcacgcggtccgaagcgaagatgcgcatcaggctgtcttccagggacaggtagaagcggctggaaccggcgtcaccctggcgaccggcacggccacgcagctggttgtcgatacgacgcgattcatgacgctcggaggcgatcacctgcaggccaccggattccagcacggcctggtgacgcttctgccaatcggccttgatctgggcgatctgctcagggctcgggttttccagggccgcgacttccacttcccagttgccgcccaacaggatgtcggtaccacgaccggccatgttggtggcgatggtcagtgcgccagggcgaccggcctgggcgatgatctcggcttctttttcgtggaacttggcgttgaggaccttgtgctcgatgccttccttattaagcaggttggacacgtgctcggaagtctcgatggtagcggtgcccaccaggatcggacggccctgggccataccgtccttgatgtcgttgatgattgccgcgtatttctcttcggccgtcaggaacaccaggtcattgaagtctttacgcgccaaaggcttgttcggcggaatgaccatcacagacaggccgtagatctggtggaattcgaacgcttcagtgtcggccgtaccggtcatcccggacagtttgttgtacagacggaagtagttctggaaggtggtggacgccaacgtctggctttcagcctggatgttgaggtgctccttcgcttcgatggcctggtgcaggccctcggacagacggcggcccggcatggtacgaccggtgtgctcgtcgaccagcacgacctggccgtcctgcacgatgtactcgacgttgcgatggaacagcttgtgggcacgcaggccggcatacacgtgggtcaacaggcccaggttgtgcgccgagtacaggctttcaccctcggccaattcgccgatctgggtcagcatctcttcgacgaactggtgaccggcttcgttgagttcgacctggcgggtcttctcgtcgatgctgaagtgaccttctttggtcaccacgccttcgacttcctcgatgtgctgctccagacgcggaatcaacttgttgatttcggtgtacaggcgcgagctgtcttcggcctggccggagatgatcagcggggtacgggcttcgtcgatgaggatggagtcgacttcgtcgatcacggcaaagttgagttcgcgctggaatttttcatccatgctgaacgccatgttgtcgcgcaggtagtcgaaaccgaattcgttgttggtgccgtaggtaatgtcgcacgcgtaggcagcgcgcttctcttccggcggctggaatggcgtaacgacgccaacggtcaggccgaggaattcatagagcgggcgcatccagttagcgtcgcggcgggccaggtagtcgttcaccgtcaccacgtgcacgcccttgccggacaatgcgttgaggtaaacgcccagggttgccaccagggtcttgccttcaccggtacgcatttcggcaatcatgccttcatgcaaggtcatgccgccgatcaactggacgtcgaagtggcgcatgcccatgacacgcttaccggcttcacgggcgaccgcaaaggcttcgggaagcagcttgtcgagggtttcacctttggctatgcgggccttgaactcttgggtcttggcgcgcaattgctcgtccgaaagggcaaccatctgctcttcgaaggcattgaccagctgcaccgtcttgagcatgcgtttgacttcgcgctcattcttgcttccaaaaagtttctttaacaaaggcgcaaacatatcggcaggttcttccacacatagggatggagggcgcaccgtgagtggcccgagcagccctcacggccgcatgcgaacgcgcattctacccggaatcgtgggtgaggaaagtggcgttattccccgatgctggcatggtgctgtgagagggcctgtttaaaataagggcttttaccggaacttcaacccatggagcgcagaagttaccgattgatttcacgcacaaaagcccatggatgctttgcctggggagatgcagacgctttctgctaagatggcggctctgttacttaaggtgtccaacaatggcatttcgcccctcgccagcccgcgcgcctgccgtgttgcttcgcgatgccaagccgctgaaagccatctttggccatgcgcaacgcctgggccatctgcaacgcctgctcgaaagccaactgcaaccggccgcgcgcgaacactgccgcgtggcgtcctggcgtgaaggcaacctgctgctaattgtcacagatggccactgggcgacacgtctgcgttatcagcaaaaacgcctgcaacgtcaattgatagcgtttgatgaattcgccggtttgacgcgcattcagttcaaggtacaaccgcccaccaccctgcctggcgtggtgcagcacactcatgacctctcgacgaatgccgccgaaaccattcaggcaacggccgacgggatcagcaacccggccttgcgcgcagcccttgagcgactggcagcccacgccaggcccaagccctgagtctctatttgcgcttgctgccgcccagtaacgaccccaacaaaccacgtaccagttgccgccccatctgattggcggcctgctgcatcgccgatttcagcgccttgcctgccgtggtgcccagaaacgcaccggccctgtcggtaaaactcggctcgtcggtagtcggcttggtctcttcggtcgggccaagctccttgcgtgacatcagcacttcgtaagcggattcccgatcaatcggcttgtcataacggccttgcagcggcgaactggcgaccaacgcggcgcgttcggcttcgctgagcggcccgatgcgtgattgcggcggagcaaccaaaacgcgatggacgacttccggcgtgcctttttcctgcaaggtgcccaccaacgcctcacccgtgcccagctcggtcagtaccgacaaggcatcgaatgctggattgggccgaaacccctccgcgacggcacgcagggatttctgttccttggtggtgaacgcccgcaagccatgctggatacgcagaccgagctgggccagcacgctgtccggcaggtcgcccggcgattgagtgacaaaatacacaccgacgcctttggagcgaatcagccgcaccacctgttccaggcgctcctgcaaggccttgggcgtatcggcgaacaacaaatgtgcctcatcaaaaaacagcgccagcagcggtttttcggcatcaccacgctcgggcagttgctcgaacaactccgccaacagccacagcaggaacgtcgcgtataccttcggtgcctcgtgcaccagacggctggcgtccagcagatggatgcgcccgcgtccatcaccagtgggctgcaggatatcttccaactgcagggccggctcaccaaacaaggcttcagccccctgttgttccagcaccgccaggcgccgcaagagggcctggctggatccggtggtcatcagcgctgcgtcttcgcccagcaattccgggtgatagcgcaggtggttaagcagtgccttgaggtccttgaggtccagcagcagcaagccttcgcgatccgccaccttgaacgccgcgtaaagcgctgactgctggctgtcagtaagttccaacaggctaccgagcaacaacgggcccatttcgctgatggtggtgcgcaatggatggccggactgcccgtggatatcccacagcgtgaccggataagccttggccgtgtaattcaggaaaggcatgccggcgatgcgctcggcgaccttgccttgcggattcgccgcagcgccgagcccgcataggtcccccttgatgtccgcggcaaacaccgccacgccggcgtcactgaaggcttccgccaggcgttgcaatgtaacggtcttgcccgtgccggtggcaccggcgatcaacccgtggcgattggccaaccgcatggcctgggcgatgggctggccggaaaggtcggcaccgataagcagttgcgaggagtcaggcatttcgtcacccatggttaatctttagtgtcgccaagtcgatacaggcagatgtaagacccacaaagtctaaaaataggtcagatagttcctacagggaccaccggagctatcacaagaagtatcacaccttttttgacgctgtcattttgcgcatcccacaaggacgcgctttggatattaagaccttagcggaccctacaagccatgaataaaaatctgcgcttcagccacaaaatcctgcttgcagcctcccttatcgtcatcgcggctttcgcgctgtttaccctttacaacgactacctgcaacgcaacgccattcgcgacgacctcaacaattacctgcatgaaatgggcgacgtcaccgccagcaatattcaaacctggctcaccgggcgcattgccctggtggagaacgccgcacaaaacatcgccatcaaccccgagccttccgcagttgccagcctgctggagcagaaaaccctgacgtcctcattcatggcgacctacgtcggtgacagccagggcgcctttaccatccgccccgacaccaagatgccggacggcttcgacccgcgtgtgcggccctggtacaagggcgcccagagcagcaacggctcaaccctgaccgaaccctatatcgatgccgccaccggcaagttgatcatttccgttgccacccccagcacccggggtactcagagcatcggcgtagtgggcggcgacctgagcctgcaaaccctggtggataacattggcgcgctgaacttcggcggcatgggctatgcgtttctggtcagcgccgatggcagagtattggtacatccggataaaaacctggtgatgaagaccctggccgatgtgtatccgaaaaatacgccaaaaatcagcgccgatttcagcgaagtcgaggccaacggcaaggccaacatcgtgaccttcataccgatcaagggcctgccttcggtgaactggtacctcggtatttcagtagataaagacaaatccttcgccatgctcagcgagttccgcacctcggcggtcatcgccacggtgattgcggtggtgatcatcatcgccctgctgggcatgctgatccgcgtattaatgcaacctttgcacgtgatgacccgcgccatgcaggacatcgccgatggcgagggggacctgacgcgccgcctgaccatccagaatcacgatgaattcggcacgctgggtaacgccttcaaccgcttcgtggagcgcattcacacatcgatcagcgaagtgtcctcagccaccgaacaggtgaatgaggtagcactacgggtggtcagcgcgtccaactcgtcgatggtcaactccgacgagcaggccaaccgtaccaacagtgtcgccgccgccatcaatgaattgggcgccgccgcccaggaaattgcgcgcaatgccgcgcaagcctcccatcaggccagcgatgcccggcacctggctgaggacggccagcaagtggtcgagcgcaatatcaaggcgatgaatcagctttcagcgatgatcagcgcgtccagcagcaatatcgaagcgcttaacagcaagacggtgaacatcggccagattctcgaagtgatcaccagcatttcccagcaaaccaacctgctggcactgaacgccgccattgaagcggcgcgtgccggggaagcgggccgtgggtttgcggtggttgccgatgaagtgcgcaacttggcgcatcgcacgcaggagtccgcgcagcaagtgcagaagatgatcgaggagctgcaagtcggcgcccgggattcggtcagcaccatgagtgaaagccagcgccacagcctcgacagcgtggacatcgccaacctggccggcgagcgcctgaacagcgtgacccagcgcatcggcgagatcgacggcatgaaccagtcggtcgccactgccacggaagaacagacttcagtggtggagtcgatcaacatggacattaccgagatcaacaccctcaatcaggaaggggtggaaaacctgcaatccacgctgcgagcgtgtgccgaccttgagcaacaagcggcacggttgaagcagttggtcggtagtttccggatctgatcaggagtcctcaggctcggacttggcctgctcttgctcccacaactcggcggcaccgggaaattcggtgccgtcctcgctgctcaggtcatccgggtcatatcggctcaaacagccctcccctaaggttgccggggcttttgacgtggctttgtccaacggatcattcatcgctcaatcctcaagggcacgcaaagaaaaagggcccggaacgatttaacgcccaggcccttcattcttcaatcacaacaggtcggtcagaacaccaccgtcttgttgccgtgcaccagcacgcggtcttccaggtggtagcgcaggccacgggccaggaccatcttctcgacgtcgcggccgaaacgcaccatgtcttcaatgctgtcgctgtggctgacacgcaccacgtcctgctcgatgatcgggccggcgtccagctcttcggtgacgtagtggcaagtcgcgccgatcaacttcacaccccgcagggaagcctggtgatacggcttggcccctacgaacgacggcaggaagctgtggtgaatgttgatcaccttgccggcgtattcgcggcacagttccggcggcaggatttgcatgtagcgcgccagcaccacaacgtcagcctcgtgttgcttgaccaggcgggagacctcggcgaacgccggctccttgtcctgcgggttgaccggcacgtggtaatacgggatgccgtgccactcgaccatgctgcgcaggtcgtcatggttggaaatcacgcaagcgatctcgcagtccagctcatcgctgtgccagcggtgcagcaaatcggccaggcagtgggattcgcggctggccatcaacaccacgcgctttttctgctcggtgtcggtgatgtgccaggtcatcgaaaactcttcagcgatcggcgcaaacgcttcacggaaggcatcaagaccaaaaggcagcgaatcggcacgaatctcgtgacgcatgaagaaccaaccgctgagattgtccgagtgatgactcgcttcggtaatccagccgttgtgggaggccagaaagttactgactttggcaacgatgccgacccggtccgggcaagcaatcaccagccgaaaagtgcgcattagggggaaactccagaacttcgcaaaggccgccattctagcgattgcgcaggaaaactgcagtattcgttaacgtttattctgatcgccggccccagctttgtcccttaatagcctatggttttaccacccttatatgaatctgtgcggcataccacggctgttcccgcttttccaagcagattatctttgggtctacgccctagtaattaactcgaatgcatagcattgctacaaacattcaaagtaattcacataaatgcgagcttaaatgtttacttgaggaaaccgcctgactattattgggccactatccctgtcaatcagcgctctacataaggtagtccacatgtctctgatcaacgaataccgtgccaccgaagaagctatcaaagagctgcaagcccgtttgaagaacctgtcccaagacgacaaactgcaaaccgagctggaattcgaaggtaaattgcgtgccctgatgggtgaatactccaaatccctgcgtgacatcatcgcgctgctggatccagagtcgaaagttaaagctccacgcggcgccgtaaaaactaccggtaccaagcgtgcccgcaaagtcaaacagtacaaaaacccgcacaacggcgaagtgattgaaaccaaaggtggcaaccacaaaacgctgaaagagtggaaagccaagtggggcggtgacgtggttgaaggttgggctaccctgctgggctaagcctcatcaggtttgcgcctgacccgtgacacattaaaaacgccagcttgctggcgttttttattgtccgcatagtctgcgaaaaccgactacagattcattctggtcgctagagcgtccgcatactcctgccattggtccagcacctgagactggaacggtgtagcactaacagcaaactcaagccgagcctgtttaaacgcatcaagggtattcggcgcgccccattccgggctcgacaaacgttgctgacagaaaagtttccagcgcagttgctcctcgctgttcaacgtatcggggaagttgcgcgctcggtagcggaataataattcaggcaaacgctcgtcatcaaaaggccactgctggcgcgctaattgcgcaggctcagcggtccggacttgttcacataaacgccggtcacggtctccgataaaaccgccgtaaagctgttgctcaggatccgaactcggcgtgaagtcttcgtgcgcgtaaatggccgccaacttatcgcgccaaagttcctgtgcgtcagttagccgcagcgcccgttcctgaaaaatattcatgtccaagtgcagacgctcacgatcttctgcgcgcagcacattcaagggcgccaccacggggcagcggttgatatgcaccaatttgagggggaccggcaattcaccgtcggcgagatcatcacgacgggtatagaggcgctggcgcaaggcctcggcatcaaggtccagcagcccctgcggatcgagtccgaggtcacagacgatcaatgcattgcgattacgcggatgccatgcgagcggcagcacaacacccaggtaatgacgttcggcagaaaaacgcccggaaatatgcaccattggctgcagcagacgcacctggtccattacccgttgcttgctgcgcagctgaaacagccattcatacaacttgggctgtttctcacgtaccagccgagccaacgcaatcgtggcacgcacatcggacaacgcatcgtgcgcctgaccatggtcgatcccattggcttcggtcagacgctccagcttgagcgtgacgcgcccatcctgctgcggccattcaatgccctccgggcgcagggcgtaggccgtgcggaccacgtcgatcaaatcccagcgactgttaccgccctgccattctcgtgcgtaggggtcgaaaaaattgcgatagaggctgtagcgcgtcatctcgtcatcaaaccgcagcgtgttgtaaccggcaccgcacgtaccgggggcggccagttcagtgtgcacccgagtcatgaagtcggcctcggccaagcctttttccgcgagtattacgggcgtgataccagtgatcgcacacgcgatggggtgcggcaggatatcgtcgctgggctggcaatagagattgaccggcgagccgatctcgttgagttcgaggtcggtacgaatgccggctacctgaagcgggcgatcgctgcgcggattgatgccggtggtttcatagtcgtaccagaaaatggaggtcacgggttgttcctgtactgaagatcgacaaagtctaggcgctgaaaggcttccgcgaccagcaccaaatacactgtacaaacatccagcaaactcttgaatggttgcttccatccccgacactgctagcatccgtgtcttccagccactctgcactgccaaggatcgcgatgccgtcagccccattggacacccgctaccagatcgagaccccggagggcatcgacctgcccctgcgtccggccggcctggtgccgcgcgtgctcgcctttgccttcgacctgggtgtacgcggggtgatcatgggcgttctgttggtgccattggctttgcttggcaacgtcgggatcggcctgggagcgctgctgctgtttttgatcagttggtggtacatggtgctgttcgaggtgctcaaccagggttgctcacccggcaagcaggttatggggctgcgtgtcgtacaagatgacggcactccgattggctggtccgcttcactgattcgtaacctgctgcggtttgtggacatgctgccgttcggctactgccttggcgcgatcagttgcctgcagcacccccacttcaagcgcctgggcgacctggccgccggcacactggtgatctaccgggaacaaccgctggtacggccccagattcctcaagcaacagccctgcgcttgccctttgccctggatttgagtgaacaacgggcgatccttggttttgcggaacgccaaggggaactgtccaccgagcgtgttcacgaattggcctcgattctcgccgcgcccttgcaggtatcccccgaccgcgctgcggaacaactcaatggcgtggcccgcggcctgctggggccgacatgaaacagagccttttcgaaagccgtcaccaacgccaatggcaaaccttcgccgagcagctcacacagttggagcaagggcaggccaaagccgctgaagtggccgatttccctcatcaatatcgacgcctgtgccagcacctggccctggcccaggaacgtggctacagcagctacctggtagacccattgcaacaactggccctgcgcggccaccaacaactctaccgtcatcgcagccaactggcggcgaatgcgctgagctttgtactcgccgattttcctcggctggtacgggaacagtggcgtttcgtgctgatcgccagcctgctgttcttcggcagcctggtgggtattgccctgctggtctacctgtttcccgacctgatctacagcatcgtcagcccgcaacaggtggccgagatgcaggccatgtacgaccctgatgcaagccgcctgggccgcgccgccgagcgtgcatcaagtgaagactggatgatgttcggctactacgtgatgcacaacatcggtatcgcgttccagacgtttgccgccggtttattgttcggcctgggcagcgtgttctttctgattttcaacgggctcatcatcggtgcggtctccggtcacctgaccgagatcggctatggccagaccttctggtcattcgtcatcggccatggcgcattcgaactgaccgcgatcgccctcgccggtgccgcaggcttgcagttggggtgggcactgatcgcccctggacaactgacccgtggtgaatcattgcggctggctgcacgcaagagcgtgcgaatgctgtgcggtgtcatgctgtttctgctgatcgcagctttcatcgaggcatattggtcatccaccaccgtgataaccccgtggatcaaatacctagtgggcgctgttctgtggctgctggtgggcacttacctgggctttgccggaaggaatcgccatgcgcctgactgatgccagtgtggtcatccggccgcgtactgcctgggaagccatggatcttggcgccttgatggcacgggagcatcgcgtgctattgatgggcagttgggcgttagtcaccctacctgtgttcgccttgcttacagccctgctgtggcagtatccgtccaccgccatatttcttttctggtggctcaagccggccttcgaccgcttgccgctgtacattctgtccaaggccctgtttggtgaaacgcccactatcaagcacgctgtgcgccagtggccgcgcctcctcaagggtcaactgctggccagcctgacctggcgacggttcagcctgagccgcagctttgtaatgccggttagccaactcgaaggcctggacggcccggcacgccagaaacgcctgggcgtgttgcagcaacgcaatgccggagccgcacgctggctcaccatcatcgggatgcaccttgaaatcggcctgtggttcggctgcatggcactgttctatctgttcatcccgcaaaacctcgagatggactgggactggcaacgcctgttgttggcgacaagctcggaagggttgtggctggagcacctgggcaacgcgttctatgccttgctcctgatattttgggaacccatctatgtcgcctgcggcttcagcctctaccttaatcgtcgcaccgtattggaagcctgggatctggaactggtattccgacgcctgcgtcaacgcctgagcaatgtggcaccgatgttgttgctgatgatcggactgatgctgctgcctctcagccttcccgtcatggccgatgcttccagcccctccaagccactgagcactccgagcgcgagccaatccatcaaatcgctgctggacaagccgcccttcaaaaacccggaaaccgtgacccgttatcggtttggagaagaaaagccagccggtaaaaacaaaacgcccaataacggcagacttcccgattggctgaaggccttgctggacaacctcaacagcaataccttcaagcacatcgcccaaggcctggaaattctgctgtggagcgtgttcattggtagcctgatcatgcttgtgtggcgctatcgcgagtggttgcgcacctttgtcagcagacgcggaccgcgcaagacagaggttgtcaaaccgctgcccacgcagttgttcggccttgaactgggcaccgaaaccttgcccgacgacgttgccggcgccgccgaacacctatgggccacccaccccagggaagccctcggcctgctgtaccgaggcctgctcagccggttgttgcatgatttcaacctgccgttgaaagacgctgataccgaaggccaggtcctggcacgtgtacaccagttgcaacacccccaactgctggccttcagtgatgagctgacccggcattggcaaaacctcgcctatggtcaccacctcccagcgctccctgcccagcagaaactatgcagtgattggcgcgccctgttcagtccagggagcaactgatgaatcgtccattactgtgggtggggttattgctggcatgcctgcttggagcgggcggttactacgtgtggagcaaggcgattccctatgacgaagtggtggatcgtggtccttcgccggaggcactggccaatccctatctggcggccgaacactttctgcgtcaacaaggcctcaccgtggaacacgccaatagcctgaaacggctgggcaccctgccttccaaaggcaacagcctgctgctgctcggcgaacgcagtaacctgtcaccacgccaggtagaacagttgctggcgtgggccagatccggcggtcatttgcttgtggtcgccgaggcgctgtgggatgaagagacaggcaaaagcggcgacctgctgctcgatcgcctgcatattcaccagaccttgagtgacgagcctgaagaatctgccacttccgtcaagaagccctcgaagatgaaagccccggacctgaccaagctctatgtcgacaatgaaaccgcatcggcttacttcagtttcgacacagatttcaacctcaccgaccccaggcacctggctcaattttccgctaacagcgcgagggccagccacctgatgcagcttgacctcggggaaggccgcgtcacagtgatcacggacagcgacctgtggaaaaccccgaacatcggaaagcacgacaatgcctggctgctctggtacttgaaccagggcaccgccgtgaccttgctgttcaacagcgatttcgacgacctgcttagcttgctgatgcgctatttcccccaagccctggtcgcactcgttgccctcgtcgccttgggactttggcgtgccggcgtgcgtcaaggcccgatccagcaccccgcttcccctgctcgtcgccaactgcaggaacatctgaaagccagtgccgacttcctgctgcgccgcagcggccaaggcacactgctgcagactttgcagcgcgatatcctgcgtgcggcccgacgccgtcaccccggctttgaacacctcgacaacgcagaacagtgccgggtgcttgaacacctgacgcgccaaccccctcacgtgatcaaccaggcccttggcccactcccggcaaaacggctttccagcgccgacttcagccggcaggtggcgtgcctgcaaaccctcaggaatgccttatgagtgatttcccaagcgccactgccttgacccgcgaatccctgcaacgcgccactgggcaagctcaagccctgcgaaccgagttgcgcaaggcggtgattggccaggacgcggtgatcgacgatgtcctgaccgcactcatcgctggcggccatgtgctgctcgaaggtgtgccggggctgggtaaaaccttgctggtacgtgccttggcacgctgcttcgagggcgatttcgcacgtatccagttcaccccggacctgatgcccagcgatgtcaccggccacgccgtgtacgacctgcacaccgaacaattcaagctgcgcaaggggccggtgttcactcatctgttactggccgacgaaatcaaccgtgccccggccaagacccaggcggccttgcttgaggccatgcaggagcggcaggtgaccctcgaaggcgaggcgctgcccatcggccaaccgttcatggtactggcaacccagaaccccatcgaacaggaaggcacctaccccctgccagaggcggaactggatcgcttcatgctcaaggtgcgcatggattaccccgacgcgcagcaggaactggacatggtgcgcgaagtcacacgctcgtcgcgggccgacatgctggatgtacacccattgcgcacggtgttgcaggccgaagatgtgctgcaactgcagcaggttgccagtgaccttgccctggacgaacaggtgctcgactatgccgtgcgcctggcgcgcgccacccgtaactggccaggcctggcgatcggtgctggcccacgggcgtccattgacctggtacgcggcgcccgcgcccgcgccttgttgcgcggtggtgagttcgtcacgccggatgacatcaaggaatgcgccctggcagtactgcgtcaccgcgtacgtatcgcgccagagttggatatcgacgggctggaggtcgaccaggtgctcaggcaattgctcgatcagattccggcacctcggcaatgactcgcctatgaagccgacccgtctgctgttgaactggctcggcgcattgctgggtctgggcatcctgctgggcactgcggcagcgttgcagctcacagtatcggacaccttgcactcactcgtctggggattactcctggcgttgttgctgttggccatgctggacgccgtacgagggcatcgccgcccctctccgcgtatacaacgacagatgcccggcagcctggcgttggggcgctggggcgaaatccgcctggccctggaccacgacttcccacagccgctgacggtgcaggtattcgatcatgcccccgacgggttgagcgtggagaacatgcctcagtccataaccttgtatcccggtgaacgctgcgaactgggctaccgtcttcgccccctgcggcgcgggcatttcagtttcagccgctgcgaagttcatctgcccagccccatggggctatggtctgcacgacgctatatcgaggtgaacgacaccacccgcgtctacccggatttcgcccgactgtacggcgcccaactgctgggcgtagacaactggttgagccaattgggcgttcgtcaacgccaacggcgtgggttggggctggagtttcatcagttgcgcgagtttcgcgaaggcgacagcctgcgccagatcgactggaaagctactgcccgacaacgcacccccatcgcccgtgaataccaggatgagcgcgaccaacaaatcgtgttcatgcttgactgcgggcggcgcatgcgcagccaggatgacgaactgtctcactttgaccatgctctcaatgcgtgcctgctgctcagctacgttgccttgcgccaaggcgatgccgtggggctgtgcacctttgccggtgaccagtcgcgctacctggcgccggtcaagggcagtagccagttgaacctgttgctcaatgcggtgtacgacctggacaccacccgacgcactgccgattaccaggcggcggcaagtcaactgctggcccggcagaagcgtcgagccttggtcattgtggtgagtaacctgcgggacgaggacgatgaagcactgttgactgccgtcaaacgcatcagtcgccaacataaggtgctggtggccagcttgcgcgaggaggtactcgaccaactgcgccatacccctgtgcaaaccttgcccgaagccctggcctacagcggcaccatcgactacctcaacacacgggatgagttgcatgaccgcctgagcgcgcacggtttgtccgtgctggacaccttgccctctgagctgggccccgcattggtgacacgctacatgggttggaaaaaagccgggaccctctgaggagaaaggttctgaaaagaaacactcgaccacggcagggcataaagcccctgaaccgggtcgagagcatgttgccgctaagccgaagcctgcaaaggatcaaaactgaagtaatgcaacaacacgttgatcaattgcccatactcctccggggcctgctgcacactgaacccggagtcgtaatgctgggggttgatatcttcgtgactccacaggcaggtagccgtgagatcaattggatggaaggtgccgtcagcctccggaatcttcaagcgcagctcgaaatccacgtcgaccatcatgggcaattggctgatcaacatcagcccatcttccgatacattgcccaaaaagccgatgggcttatcggtgagtcggttaaacacttgcaggaaataaggtagctgatgccgctcgatccgtcggtcggtaaacatggtgagatcgccatccagtggccataactgcggccgtgccagtgattcggaacgagaaaataacgcccgctctccatggatctcggtacgacaacaggcaatagtccgccgccagaacagctaccgaatccgggccccacattcgtttgcatggaaacttgtacaaacgaacatccaaaggatagcccaagactggcaacaggccagttatgaaatgacgaatatcatcacaacgaagcgggacgtggctgggcgacacttgcaccggggtaatgccccagctgctgcaaggtatcgagcctcgcacgagcacgataggcgtactcactcgacgggtactgattgatgatgaattgataggtctgcaccgcatcaacgaacagcttttgccgttccaggcactgcccgcgcaacatcgagacctccggctgcacatagcggcgcgtgcggctttcacggtcgacctgggataactccagggtgacacgctcgcaatcgccgaccttgtaggcacgataggcattgttcaaatgatggtccatcgaccaacgggtgcagccgacaacactgacggccagggcagcaacgagcaaaattcgcatgagggttctcctgtcttgtgcagtgtatcgacccctcgtcgaaaatcttcaaggatgttcgtattcagccgcagcgaaaacaagtcaatcatcgataagtagtgcaaacgaacaatgactacaacgaaagagcatagtagccttcctcagcgcttgaactcaggagtctgtgcatgtccgtccgtcgtaccaaaatcgtcgccacccttggcccggccagtaactcgccggaagtcctcgaacagctgattctggctggtttggacgttgcccgtctgaacttctcccacggcaccccggacgagcacaaggctcgcgccaagctggtgcgtgacctggctgccaagcacggccgcttcgtggcactgctgggcgacctgcaaggccctaaaatccgtattgccaaattcgccaacaagcggatcgagttgaagatcggtgacaccttcaccttctccaccagccacccgctgaccgaaggcaaccagcaagtcgtgggtatcgactacccggacctggtcaaggactgcggcgtcggtgacgaactgctgctggacgatggccgcgtggtcatgcgcgtcgataccgccaccggcaccgagctgatctgcaccgtgaccatcggcggcccgctgtccgaccacaaaggcatcaaccgtcgtggcggtggcttgacggcaccggccctgactgaaaaagacaaggccgacattaagctcgccgctgaaatggaagtggactacctcgccgtgtccttcccgcgcgacgccgccgacatggaatacgcccgcaaactgcgcgacgaagccggcggtaccgcctggctggtggcgaagatcgaacgcgccgaagccgtggccgacgacgaaaccctcgacggcctgatcaaggcttccgacgcggtgatggttgcccgtggcgacctgggcgtggaaatcggtgacgccgagctgatcggtatccagaagaagatcatcctgcacgcacgccgccacaacaaagcggtgatcgtggcgacccagatgatggagtcgatgatccagaacccgatgccgacccgcgccgaagtgtccgacgtggccaacgccgtgctcgactacaccgacgctgtgatgctgtcggccgaaagcgccgccggcccgtacccactggaagccgtgcaggccatggcgcgtatctgcgtcggcgccgaaaagcacccgaccagcaagacctccagccaccgtatcggcaaggtgttcgaaagctgcgaccagagcatcgccctggccgccatgtacaccgccaaccacttcccgggcgttaaagcgatcatcgccttgaccgaaagtggctacacgccgttgatcatgtcgcgcatccgttcctcggtgccgatctacgcgttcactccgcaccgcgaagcccaggcccgcgcggcactgttccgtggcgtgtacaccattccgtttgatccggcttcgctggcaccgaacgaagtcagccagaaggcaatcgacgagttggtcaagcgcggtgtcgtggagcaaggcgactgggtcatcctgaccaagggcgacagctaccacaccaccggtggcaccaatggcatgaagatcctgcacgtgggcgacccgcaggtctgagtgacacgctgaaaaacaaaagccccgccatgaaaatggcggggctttttgcatttcagggaagctgttgtgtgatgccaaaggacctcatcgggggcaagccccctcccaccttttgaccgcgctgcctatcaaatgtgggagggggcttgcccccgatgaagcccgatcaaccaccacacgttcatcgccgggtgataaacgctgacaacgccgcaatcgcctcaggcgacttcaaccgttgggtgaacaaagcgccctcctcctcgatcacctgccgcaactgctcgcgatccacactcttcatcaactgcttggtgacctgcaccgcccccggcgccagggtctcaaaacgctcggctacttcccgcgccttggccaatgcagcctcgccactgcccagcgcttcggtggcaagcccccacgccgctgcctgttcgccgctaaacccctcgcccagcagcagcaattcggcggctttcgcgtgccccagcaacctcggcaaaatcaggctggacccgaactccggacacagccccaggttgacgaacggcatgcgcagccgcgcatcgcggctgatatacaccaagtcacaatgcagcagcagggttgtgccaatccccaccgcagcccccgccacggcagcaatcactggctttctgcaattgagcaggcttttcatgaagtgaaacggtgggctgtcgaggtcgttgggcggctgttcgagaaaatcgctgatgtcgttgccggccgtgaaacactcattgctgccctggatcagcacgcaacggatatccgcgtccgcgtcggcgtgctccagtgcattggccaattgcgtgtacatggcacgggtcaaagcatttttcttgtcgggacggttgagctgcaggatcagcagcccgcgttcgcgcacctgttggatggtatcggtcatgacgagtctcgcggcgggaaaaatcagcgctcaaccacgaggcagaaacacatcggccagcagctgattacgcggcaatcctgccaggaacaggcgcttggaaaacgcctcgacgctggctgggtgcccgcagagtaaggccagcgtttgccgcgaaacaagccgcagttgcgccaatgcctgggccacctgcgccgccgtccacagttccaccgacacgtttggatgctgtgcagccaactgcgccaagggttcggccagataatggccttcggcatcatgggccaggtgaatcacgcggatggcgccctggtgatcctggcgcagcgcctcacgcaacacgccccacaacggccccaacccggtgccggacgccagcagccacaatggccgcgtttgccagtccggatcatattgcagcgcaccgccgcgcaaatcacccaggcgcagccgatcacccacctgcaactgccgggcaagatcgctgaattcgcccggcaggcgacaatcgagatgaaactccaggaatggatcttcctggggcaagctcgccagggaatacggccgcgccacctgcccggcccacaacaccaggtgctgcccagcccggtaacgcaaaccgcgctccggttgcaggcgcaggcgcagtacgttcgggttcagccaatcgacacccaccacctgggccggcaagccatcacgcgtcgggtcaaacgcttcaacccgcagatcgccgctgacctgacactggcaggccaaccgccagccgtcctggcgctgcgccgggctcaaggcttcgggctgcttgtcttcgacctcgccctggcaacgcaccaggcaggcatggcaactgccggcgcggcaactgtaaggcacggccacacccgcctggttcaaggcatccagcaggttgctgccgggggttaccgaccaatggcgttcgccgacgtacagttcaggcatataaggactcagtcacaaggggcgcgcacagggaatcatgcctgcgacagtttgaccatagtcgggtgtatcggccaccgcgccgggttatactgccgcgcctttttagcgtcgcgcctgcaccactttggcgtgccttggaaaggtggacccagccgaccgatgcaacactgggcccacctttattgaatgttcccttatagaggagcgcgactcatgaccgtgatcaagcaagacgacctgattcagagcgttgccgacgccctgcaattcatttcctactaccaccccgtggatttcatccaggccatgcacgaagcctacctgcgcgaagaatcgccagcggcccgtgattccatcgcccagatcctgatcaactcgcgcatgtgcgccaccggccatcgcccgatctgccaggacaccggtatcgtcaccgtgttcgtgcgcgtgggcatggacgtgcgttgggatggcgccaccatgggcctggacgacatgatcaacgaaggcgtgcgtcgcgcctacaacttgccggaaaacgtcctgcgtgcatccatcctggccgacccggcaggtgcacgtaagaacaccaaggacaacaccccggccgtgatccactactccatcgtcccgggtaacaccgtggaagtggacgtggcggccaagggcggcggttccgagaacaagtcgaaaatggccatgctcaacccgtcagactcgattgtcgactgggtgctcaagacagttccgaccatgggcgccggctggtgcccaccgggcatgctgggtatcggcatcggcggcaccgccgagaaagccgcagtgatggccaaggaagtgttgatggaatccatcgacatccacgagctgaaaaagcgcggcccgcagaaccgtatcgaagagatgcgcctggagctgttcgagaaggtcaaccaactgggcatcggcgcccaaggcctgggtggcctgaccaccgtgctcgacgtgaagatcatggactacccgacccacgccgcgtccctgccggtgtgcatgatccccaactgcgccgccacccgtcacgcgcattttgtgctcgacggttctggcccggcgtcgctggaagcgccaccgttggacgcctacccggaaatcgtctgggaagccggcccgtcggcccgtcgcgtcaacctcgacaccctgaccccggaagaagtacagagctggaagccgggcgaaaccgtgttgctcaacggcaagatgctcaccggtcgcgacgccgcgcacaagcgcatggtcgagatgctgaacaagggcgaaaccctgcccgtggacctgaaaggtcgcttcatctactacgtcggcccggttgatccggtacgcgaagaagtggtcggcccggctggcccgaccaccgcgacgcggatggacaagttcacccgtcagatccttgagcaaaccggcctgctgggcatgatcggcaaatccgaacgcggcccgactgcgatcgaagcgatcaaggaccacaaggccgtgtacctgatggccgtcggcggcgccgcttacctggtggcgcaagccatcaagaagtcgcgcgtagtcgcgtttgccgaactgggcatggaagcgatctacgagttcgatgtgaaagacatgccggtgaccgttgctgtcgacagcaagggcgaatccgtgcacatcaccggtcctgccatctggcagaaaaagatcagtgaaagcctggcggtagaagtgcaataagcgcttcccctccaaacataaaggcgactgcggcccatggcccagtcgccttttttatggcacatgctatggtgcactccccttaccgtgcctgcccatcaccgtatgatcgcgatcccccgccccctgcgcctgaccttctactccctgctgatcatcgccggtgccctgctggccgcagccttggccactcgccacgccgaacgccaggccctggtggacgatgccgcccgtgccaatcagcaactggcactctatgccaactcgttgcacaccctgatcgaacgctaccgcgcgctacccgccgtgctggcgctggactcggaaatgatcagcgcgttgaaaggcccgctggacgccgccactcaggacgtgctcaaccgcaagcttgaacgcatcaatggcgccgcgcagtcctccaccctggaattgatggatcgcaccggcctggcggtggccgccagcaactggaacctgccgagcagttatgtagggcataactatgcgttccggccttacttcagccagaccttgagccagggcaccgggcgtttttatgcggtgggtgtgacgaccggcatcccagggtatttcctctccagcgcggtgctggatgaacacgagcagttcctcggcgccatggtggtcaagctggaatttcccgagcttgagcgtgaatgggcccagggcaatgatttgctgctggtcagcgatgcgcggggcatcgtgtttatcgccaaccagcccggctggcgttatcgcaacctgcgtccgttgtcggccaacgacctcgccgagctgaaagccacccgccaatacgacaaaaaacaactgcaggcgctggagacccagaccctgcagcgctttgacgaaaacagccacctgatgcgcgtcaacggcccggacggcaatgccaattacatctgggagtccttgccgctgaaagccgaaggctggaccctgcacctgttgcgcaagccccagttcgcctttgaagatcaacgcaacgccggcctggcggccgccggttcctggctggcgttggtattcctagtgctgttcctgacccaacgctggcgcctggcccgcttgcgccagcgcagtcgcgaagagcttgagcaactggtggaagaacgcacccaggcgttgcgcaccgcgcaggatggcctggtgcaatcggccaaattggcggcgctggggcagatgtccgccgccctcgcccatgagatcaatcagccgctgacagcccagcgcatgcagttggccaccttgcgcctgctgctggatcacggccgcgtcgacgacgcctaccaggccctcacgccactcgacgatatgctcacgcgcatggccgccctcaccggccacctcaagaccttcgcgcgcaaaagcccgagcggcctgcgtgaacgcctggacctggccaccgtggtcgaccagtccctgcacctgcttgacgcccgcctgcgcgatgaggcgatcggcgtggtgctggacctgacccgacctgcctgggtgcgcggcgatgccatccgcctggagcaggtgctgatcaacctgctgcgcaacgccctcgacgccatggccgacaaaccgcgcaaacgcctggaaatccgcctgcacgccgatcagcagctgtggcaactgacggtcagcgacagcggcggcgggattgccgaagaacacctgaacagtgtgttcgacccgttctttaccaccaagccggtgggtgacgggctcggtttggggctggcggtgtcctacgctatcgtgcacgaattgggcggtcgcctgatcgccggcaaccgtggcgacggtgcggtatttaccctgactctacccatcgcgctggagacgcccgacctatgttgaacgcggtgattgtggtcgatgacgaagccagcatccgcacggccgtcgagcaatggctgagcctgtcaggctttgaggtgcagttgttcagccgcgccgacgaatgcctggcgcaactgccccgtgatttccccggcgtgatcctcagcgacgtgcgtatgccggggctcagcggcctggagctgctggccgaagtgcgacgccgtgatgccgatctgccggtgattctgctcaccggccatggcgatgtaccgatggcggtcgaagccatgcgcgatggcgcctacgacttcctcgaaaaacccttcagccccgatgccctgctcaacagcctgcgccgtgctttggacaagcgcgggctgatcctggaaaaccgtcgcctgcaccaacaggccgatcatcgggcgcaattggaatcgacactgctgggcgtatcccgaagcttgcagaccttgcgtcgccaggtgctggacctggcgaacctgccggtcaacgtactgatccgtggcgagaccggcagcggcaaggaaatggtcgcgcgctgcctgcatgatttcggccctcggtcaaagaagccttttgtagcgctcaattgcgcggcgatcccggagcagttgttcgaggccgagctgtttggtcacgaaagcggcgcgtttaccggcgcccagggcaagcgcatcggtaaactggaatacgcccacggcggcacgttgttcctcgatgaaatcgaaagcatgccgctggcccagcaggtaaaactgctgcgtgtgctgcaggagcagaagctggagcggctgggctccaaccagagcatccacgtggacctgcgcatcatcgctgccaccaagccggacctgctggaagaagcccgcgccgggcgctttcgcgaagacctggcgtatcgattgaatgtcgcgcaattgcgcctgccgcccctgcgggagcgtcgcgaagatatcccgttgctgttcgatcacttcgcacagagtgccgccgaacgcctgggccgcagcgtcgagccattgagcggcgcgcagttggggcgcttgctcagccatgactggccgggcaacgtgcgcgagttggccaacgtcgccgaacgccaggtgctgggccttggcgacccggaaccggaaggcatcgaggccggacagtccctggccgcacagcaagaggccttcgaagcgcactgcctgaaagccgcgctgacccgacacaagggcgatatcaaggcagtactggccgagctgcaactgccgcgtcgtaccttcaatgagaagatgcagcggcatgggttggtgcgggagatgtttctctaggcgaatccttgtgttgactggcaggccgctatcgggggcaagccccctcccacattttgatttgtgaacgcgctcaagtgtgggagggggcttgcccccgatgaggacagcagccataagcggatttccgctcacccccctgaaaatcatcagcgactttccgctcaaaaaaatcaccaaacccttctaggccgggccttcatccacctggcacagctcctgctatagctcgagccaggctgcgcacgcgccgctccataaaaacaactagatgaaggatccttcaatggataactccaacgccctgcctctggggtcggcggccgcgccgacgaaagagcgcactacctccagccgcatcaaatcgattttcagtggttccgtcggcaacatggtcgagtggtacgactggtacgtctacgccgctttctcgttgtacttcgccaagactttcttccccaaaggcgacaccaccgcccaactgctcaacaccgccgcgatcttcgccgtgggctttttgatgcgcccgatcggtggctggctgatgggcctgtacgccgacaaggtcggccgtaaaaaagccttgatggcctcggtctacctgatgtgcttcggctcgctgctgattgccctgagcccgggctatgaaatcattggtatcggtgcgccgatcctgctggtctttgcccgtttgctgcaggggctgtcggtcggcggcgaatacggcacctccgccacgtacctcagcgagatggcgaccaaggaacgtcgtggtttctactccagcttccagtacgtgaccctgatctccggccagctcatcgccctggcggtgctgatcgtgttgcaacaactgctgaccaccgagcaactgtatgcctggggctggcgtatcccgttcgccatcggtgccctctgcgcggtggtggcgctttacctgcggcgcggtatggaagaaaccgagtcgttcaccaagaaggaaaaagccaaggaaagcgcgatgcgcaccttgatgcgccaccccaaggaactgctgaccgtggtcggcctgaccatgggcggtacgctggcgttctacacctacaccacctacatgcagaagtacctggtgaacaccgtcggcatgagcatttccgactccaccaccatctcggcggcgacgctgttcctgttcatgtgcctgcaacccattgtcggcgggctgtcggataagatcggccggcggccgatcctgatcgccttcggcatcctcggcaccctgttcaccgtgccgatcctcaccaccctgcacaccatccagacctggtggggtgcgttcttcctgatcatggcggcgctgatcatcgtcagcggctatacctcgatcaacgccgtggtgaaggccgagttgttccccaccgaaatccgcgccctgggcgtgggcctgccgtatgcgctgacagtgtcgatcttcggcggcaccgctgaatacatcgcgctttggttcaagagcatcggcatggaaaccggttactactggtacgtgaccgcgtgcatcgcggtgtcgctggtggtctacgtgaccatgaaggacacccgcaaacactcgcgcattaccaccgactaaacgtcagttgcagtcaacctgtgggagggggcaagcccctcccactttttaaatcaggacaagtcagctatcgccttacgtccgtaccgccgctgcgcgtacgacgcccccgcaatcatcaccaccaacaccgccgccaaaactgccgacgaaccgatggtgccgaaatccagcccacccttctcatggggcttggtaaggaagtcacccaaggtcgcgccgaacggccgggtcagtacaaacgccacccagaacaacagcactgaagaaatcctggtgaagtatttgagtgccaccaccgccgcaatcgccgagccgatcaacaacgcgccgccggcaaaacccagccctgagtcatctgccaggaaatcgcccaacgcggtgcccaaggtgttggagaacaggatggccatccagtagaacaactcaccccggaaggtctgcaccttgttcacgttcagcgaatcgccgctgaggtgccacaacgcgaagatgatcatcaggatcgcgaccaggatcatggagcccgcggcataacccagccccaaggtgcggtccatgaaatccgacatggtggtgcctgcggtgctggtggacaaaatcacgatccagtacagcaccgggttgtaggttttcgagcgcagttgcgtcaccagggtgatcaggaacacgctgatcagcatcatcgaactgatggcataaccgacattgagggtcatcgacagcaaatccccggcggtttcgcccagggtggtcgcgcagattttcatgacccagaacgccagggtgatctgaggaagtttattcataagggggaaggctccaaagctcagtctctcaataggccgacttatcgggttgtcgacagtgggcgcagactgacggtggagctgtgaaaaataggtgggcgatgaatgaaaattccatagtatggccacttcatcgacgaccactgcaggagccccggccatgcccgacgatatccacttctacgaacccgccaacggccacggcctgccccatgacccgttcaatgccatcgtcggtccacggccgatcggctggatttcgtcccacgaccgcgaaggccgcctgaacctggcgccctacagttttttcaatgcgttcaactacattccgccgatcattggattctccagcgtcgggcgcaaagacagcctgaacaacatcgagcagaccggcgagtttgtgtggaacctggccacccgcccgttggccgagcagatgaaccagagttgtgccccggtatcaccggacgtgaatgaattcgaattgtccgggctgaccccagtggcctcgaagatcgttggtgtaccgcgggtgggcgagagcccggtgtcgttcgaatgcaaggtgacgcagatcatccagctgcaacgtgccgacaaagagttggtgccgagctggctggtgctcggtgaggtggtcgcggtgcatattgccaagtggctgctcaaggatggcatctacgacaccgccgccgccgagccgatcttgcgcggtggcggaccggcggattacttccagctggggccggaggccctgttcaagatgtatcgcccaggcgccggcaaaccttgactgaaacacaataaaacgtgggagggggcttgcccccgatggcaatggcacatccaacatcgttgttgactgacacactgctatcgggggcaagccccctcccacattggattgtcggcgttgctcagttggcggcgctcgcccaggtcagctgcccctcttcatccacaccgatcagccgttcaagctgcacggtggctgcatcatcggcatcggcggccgtcttgaacgtctgtccgtccaggattttgtgaaactgcggggcacccatgccatcgagtgccttgacggcgacggcggcgctgtagcccccttcacccggtactacggcggatacggcttcgtggtgggcaaattgtttacgtgccatgttgcaggtcctggccaatggaaagtcggccattctagaccttcagccggcgagttgcaggtactcgccgtaggcgtgtgcggcggatgcatcggtaaaggtctggaagtccatgctgcgcacgaccatgtcgttcaacagctcggtaaagatcatcagcgctggagaattgaagtaggcgctcatcgcctgttcgctgctccagaaaccggagatcaaccatacatcgggatcgacctgggaatgctgcaacgagaattgcaggcaaccctgagcctggcggcccggttcgatcaaactgctcaagcgtgcaccgagttcggtgctgcacccggtgcgggcgcggataaaggccatatggctcgcgggaatgggggtggacatgttcgactctcccgttgagaagtgatgctcggcaagcactgtgagggcgtgttgccacaggatcaaagataacggcgcgggtagtcgcgcggttagtcaattcctgtcggcttattgcacaatcctgcgagaagcgtaggggggacgttcggcacagcggttttattccagggcccaacgccttgtttcagggagatgacaggtgccgcgattgcctgattcacgatgtatcgcaggatcaggcaaggattgtgcagaatcgacgtaacactgtttgaaaagccgccgctaagctgaacccatcgaagtagcccctagaggacgttccatgtcgtcgcccgaacataaagccatccccctcgacgccgagatggaaaaacagcgcgccgaactggccagcatcgtgcaccggcatacctgggaggacggctcctacggtacggccatcaccactctgtttctgaaccgccacaacaccccgcgcgacttcatgccggtgctggtggaaccggccctgtgcatcctggccagtggcagcaaggaagtccgcctggccgacgagatctttgcctacgacccgctcaactacctggtgttctcggtggcgatgccggtggccgggcggatcatcgatgccacgccggaagacccgaacctttcggtgcgcatcaatatcgatccggcgcaactgacagccctgatcgcagaagcaggcccaatgggcgtgccgtcgcgcccgacttctcgcggcatgtacgtcgatcgcatcgacggtcaactgctggacgccgtactgcgattggcccgcctgttggatacgccgaaagacatcgccatgctcgcgccgttgatcaaccgcgagattctttatcgcctgttgcgcggcccgcagggttatcggctgtatgaaatcgccgtggccaacagtcagagccatcgggtcagccaggcgatcaagtggttgaacggcaactacgaacaaccgctgcgcatcgatgacctcgccaaggaagtgaacctgagcgtctcgaccctgcaccaccgtttcaaggcgatcaccgccatgagcccgttgcaataccagaagcagttgcgcttgcaggaggcacggcgcttgatgattgccgaagggttggaagcgtcggcggcggggtatcgggtggggtatgaaagcccatcgcaattcagccgggaatacagccggttgtttggcgcgccgccgttgcgtgacctggcccggttgcgccagagcatttaatcgagggtgcgcggcagctgcaacgtcacccgcaacccaccctcacgcaaattctgcaaactcacttcaccgccatggctgtgcgcaatgttgcgcgcaatccccaggcccaagccgtaaccctgttgctgcccggccaggcggaagtgtggctcgaatacttgctccaaccgctgctccggcacgccaggcccctcgtcgtccacatgcaggacgaactccgcgccatcgtcctcgatgtgcagatgagcgttctgcccgtacttcaaggcattgtcgatcaggttgccaatgcaacgtttgagcgccagcggcttgcccggatacgccgccagggctgcaccgttcagcgtgacccggccgttgccgttgggtgccacgtaaggctccaccaggcattcgagcacatggttgaggtccaccggctcgatgttttcgtggatatccgtgtctttcacgcattgcagcgcgcccttcaccagcaactccagttcatccaggtcacggccgaacttggtttgcaggttctcgtcttccagcagttccacgcgcaggcgcaggcgggtgatcggtgtgcgcaagtcgtgggaaatcgcactgaacaactggctacgctcggtcaggtagcggctgatgcgctcacgcatggcattgaaggcacggcccacttccaccacttcgctgccaccgccttcggccactggttccacgtcggcccccagggacatatcccgcgccgcccgcgccaaacgcttgagcggccggctttgccagtgcaccagcaggccgatgaacaacagcaaaaagccgctggtcaacacgatgaaccacacctgctgggacggcaggccctgttcttcaaggctggtgtagggctcgggcaacagcgaggcgatatacaaccattcgcccggggcgagctggatctgggtgaccagcaccggcgggttcaccggttccagggtcagcgcgtagtgagcccaggaacgcggcagctcatcgagtttcaggccggcattgaagatgcgcaggtcttcggcgctgacgaactccaccgacatatgcacatcggcgccgagggtctgcttcagcacctcatccaccgcttcaagcaccgcctgtttacgcggggtctgcggcaggatggccatgtccagcgggcggtcattgagggtcaccacgaaacgcgtgccgcccatgctgcgcagttgatcgagcaccagtgggcggtaggccaccggcaacgagcggaaataactcacgctggcggtcatcgaatgcgccaggctgcgggcgctggtgaccaggccttcgagctgggtggcgcgcaattgcgagacccagatcacgctggacagcgcctgggcgaacagcaccgccagcagcgtcagcagcagcatgcgccccagcagcgaacgcggcaccgggaaacgccggcggtgttcggtcaaatgttcagtggacattgccggcaaccacgctggctgccagttgataaccactgccccgcacggtgcggatcagacgagggggcttttcggtgtcgcgcaggcgttggcgcaggcggctgacggccatgtcgacgatgcgatccaacggcatcaggtcgcgaccccgggtagcattgccgatggtgtcacggtcgagaatctgctgcgggtggtcgagaaacaatttgagcagggcgaaatcggccccggagaggatcacttcttcgccgtccacatggaacaggcggtggctgatcatatccagccgccactcatcgaataccagcacttcgccgccgttgctgcgctcctggccgaactggcaacggcgcaacaaggccttgatccgcgcttgcaactcgcgagggctgaagggtttgccgatgtagtcgtcggcgcccagctccaggccgatcacacggtcggcctcgtcggaactggcggtgagcatgatgatcggcacctgcgcctggcgcgggtgctggcggatccagcggcaaaggctgaaaccgtcttcgtccggcaacatcacatcgaggatgaccaggtcgcacggcgcctcgttcatcgcctggcggaaccccgcgccatccggcaccccacgcacctggaaaccggcgcgactgaggtaggtctgcagcaattcgcggatttcctggtcgtcgtcgaccaggaggatcgatttactgattacgctcacggggtcctccttgttgttatggggggttgttgatggcctcatcgggggcaagccccctcccacactggaatgcgttcccaatgtgggagggggcttgcccccgatagggccatcagcccctatgcaaaagcctgttccaacgcgacgccagccccggtcaacccggaatacggcgcggtcaccaaccacaccggaatacccttgaagtagtcgctcatgcagcctttgtcagcaaagctcctggcaaaaccgctgtggataaagaagtcggcaaacctcggtatcaccccgcccacgatgtacacaccaccgcgtccaccggtggtcagcacattgttaccggcgacgcggcccagccagatgctgaactggtccaacacctccatcgccaccgggtcaccggccaggccggcggccgtgatggcttcgggcgtttccagtaccggcgcatggccgtcgactgcacagatcgcccggtacagacgtggcaacccaccaccgctcaaagcggtttcagcgctgacatgcccgatctcggtgtagatgtgctgccacagttgggtttcccgtgggctgctcagcggcaggtcgacatgcccgccttcccccggcagcgccgcaaagcggccaccgcccaagtccagcaatgtaccgacacccaggccagtgcccggaccgatcaccaccgcaggccgcaacggctccggcgtgccttcgcagaccacgcggaattcgtcgggcttgaggcgggtcatgcccagggccatggccgagaagtcattgaccagcagcagttcgtccacctgcaacgccttgcaaaacgcagtcttgctcaggcgccagtgattgttggtgaatttaaattcatctccgctcaccgggccagcgacagaaagacacaccgcgccgatgtccccgatttccaggccttcctctttgaggtagaccttgatcgcctcttcaggactcttgtgatccgccgtggcatgcacacggatcgaatgcagttcctgatcccgccacaacgcaaaacgggcattggtgcccccgatgtcaccgaccagcgcaagcttcacttaagcgtctccaaggcacaggtaaaggcgctggcgccctgctctgcggagcttgcggccaagcgcataaatgcaaacagctcgcgaccggcccccacgttattgcccaacaggcccgtggcaggcgcgcgcgctgcaaattcttcggcgtccaccttaagctccagggtgcccttcacgccatccacgcgaatgatatcgccatcgcgcacccgcgccagtggtccgccgctctgggcttcggggttgacgtgaatcgcggcggggatcttacccgacgcgcccgacatacgcccgtctgttaccagcgcgaccttgaagccacggtcctgcaacacaccgaggaacggcgtcatcttgtgcaattcgggcatgccattggagcgcgggccctggaagcgcatcaccgcgacgaagtctttttccaactggccggccttgaacgcgtcggccaggtcctgctgatcctggaacaccacggcgggtgcttcgacaatctggtgttcaagggccacggccgagactttcatcacgccgcgccccaggttgccttccatcacgcgcaagccgccctcgggcgagaacgcacgggccacggggcgcaggatgctttcgtcgaggctctcgatcgggccgtcgcgccagatcagctcaccgtcgaccaggaacggttcctgggtgtagcggctcaggcccttgccggccacggtgttgacgtcttcgtggagcaggccggcttcgagcagttcacggatcaggaacgacatgccgcccgccgcctggaagtggttgatgtcggccttgccgttcggatacacgtgggaaagggtcggcaccacctcggaaaggtcggccatgtcgtcccaggtgaggatgatgcccgccgacatggcgatggccggcatgtgcagggtgtggttggtagagccgccggtggcgttgagcgcgatgatggagttgacgatggacttttcgtcgacgatctcgccgatcggcatgaagttgccgttggccttggtcaggcgcgtgacctggtgcgcggcttcgcgggtcagcgcgtcacgcagcggtgtgtacgggttgacgaacgaggcgcccggcaggtgcaggcccatcacttccatcaacaactggttggtgttggcggtgccgtagaaggtgcaggtgccggggctgtgataggacttcatctccgattccagcagctcttcgcgggtggccttgccttcagcgtagcgctggcgcacatcggctttctgcttgttggaaatgcccgacggcatcggcccgcccggtacgaagatcatcggcaggtgaccgtagcgcagcgcgcccatcatcaggccggggacgatcttgtcgcagatgcccagcatcaaggccgcgtcgaacatgttgtgggacagcgctaccgccgtggacatggcaatgacttcacggctgagcaggctcagctccatgccgggctcgccctgggtcacgccgtcgcacatcgcgggcgtgccgccggcgaactggccgaccgagccgacttcgcgcagggctttcttgatctgttcagggaaatgttcgtacggctggtgcgccgagagcatgtcgttatatgacgaaacaattgccacgttggcggcattcatcatgcgcaggctatttttatcttcagtgccgcaaccggccacgccgtgggcaaagttggcgcattgcagcttgccgcgcatcggaccgtcgctggctgcgccgcgaatgagcgcaaggtaagcctcgcgggtggcgcggctgcgggcgataagccgttcggtgacctcaagaacgcggggatgcatgtgtagaactccaggctaacggatgtggcgacctgagtgtctatgctgatcaaacgcccgcagcgcatgggatggcagggagtcgtttggatcatcggaccagttgattcaggtcactcgttgtagattgaacaaaatattgccactaaaaaggcttgttttctatttttatgcgaataatcttgtaattcttacaacaaatcgacgacaggcactttccaatgactcttcgtatcgcaatcaatggttttggccgtatcggccgtaatgtcctgcgcgcactgtatacccaaggctaccgccaggatttgcagatcgtcgccatcaatgatctgggcgacagttcgatcaatgcccacctgctcaaatacgacaccgtacatggcactttcgaagcagaggtcgcccacgatcaggaaagcctgaccgtcaatggtgaccggattgccgtcagtgccattcgcaacccggccgacctgccctgggctgcgcacaagatcgacgtggtgttcgaatgcaccggcctgttcaccgaccgtgacaaggctgccgcccatattaccgccggcgcacgcaaggtgatcatctcggcaccggccaagggcgcggacgccaccgtggtctacggcgtcaaccatgacattctgcgtcaatcccaccagatcatctctaacgcctcgtgcaccaccaactgcctggcgcctgtggctcaagtgctgcaccgcgagctgggtatcgaaagcggcctgatgaccaccatccacgcctacaccaatgaccagaacctgaccgacgtctaccacaccgacccgtaccgcgcgcgttcggccacccagaacatgatcccgagcaagaccggcgccgccgaagcggtaggcctggtgctgccggaactggcgggcaagctgaccggcatggcggtgcgggtgccagtgatcaacgtgtcgctggtggacctcaccgtacaactgaagaaagaagccacggcgcaagaagtcaacgcgctgctcaaagaagcaagccagcactcgaagatcctcggctacaacaccctgccgctggtttccagtgacttcaaccacaacccgctgtcgtcgatcttcgatgccaatcacaccaaagtcagcggtaaattgctgaaagtgctggcctggtacgacaacgaatggggtttctccaaccgtatgctggataactgcttggcgttgtgcaacgccgaataacgtggtttctgcgggaccttgtgaaggggcttgtgtgggagggggcttgccccctcccacattggtttgtgtcgcgcataaggaaaatagccacttgccatttgagttgatgataagcattatcattaactgcaaatcggtctggtagcactgtgagccaatctcgcttcaaccacgtctttctcacccaacgggtggttctgcttcgcaccttgcagcggatggtgaataaccacagcaccgccgaggacctgttgcaggaaacctacctgcgcgtcactcgggccctgagcgagcggccgatcgatcaccttgaacccttcgtctatcagaccgcgcgcaacctggcgctggatcatctgcgtgcgcgcaggatccaggcccgtacgctgcaggaagatgtcccgctggacgtcctgcaaagtgtcgccgcccccatcagcacgcccgaagatgccacccaggccgagcaaatgcttgaggccctgagcgtcagcctgggccagttgagcgcccgccagcagcagattttcatcctcagccgcctgcacggttgcagttaccaggagatcgccgatcagctggaagtgtccttgagcaccgtgcaaaaggaactgaagttgatcatggccatctgtgtaggtgtggccgaacgactggatcggccttaagcttcacccgacagaaacgtcgaccctagctgtaggaaagttgaatagaacgtggcgaagacccgaggaacaccgtgacggacccgaacaaactgcgcccccatgatgtggctcatgaggtgttgcaagacacggctatggaccaagccctcgactggctgatcgccttgcagtgcccgcagcccgggcagcaggccgaattcgaagcctggctggccagcgatcccgctcacgtccacgccttcgccaaggcccaggctgcctggggtggcgcgccagtgcacagcgccgccgtggccctggcagcaccgcgcaagcccagcgcctggcggcggatcaagccccattggaaaccgttggccaccgccgccgtgttgctgatcggcctgttcagcttcagcaacctgccggtgcgcctgcaagccgatcacctcaccgtggtgggtgaacgccagcgcctgcaactggacgatggttcaaaggtgttgctcaacaccaactcggcgttttccagcagcatcaaggaccaccagcgcatcgcccgcctgtaccagggcgaggcgtttttcgaaatcaagcccaaccatggcctgcccctggaaatcgacgccggccccgtacgtgccagcgtgcgcgatacagccttcgccgtgcgctacctcaatggcgaagcacaggtgcaagtgcagcgtggtgatgtcgacctgagcaataccttcgacgatgcccgcgtgcgcctgagcgccggtgaaagcatccgtatcggccccaagggtttcggtgcgcccgccaaactggacgccaacaaggacctggcctgggtgcaaggtcggctgatcttcgaaaactgcccgatgagcgaagtccttgccgaactgcgccgctattaccccggctggatcgtcaacaccaacgaccaactcgccagcgtcgccgtcaccggcaattaccgcctggaccagccgctggacgtggtgcgctccctggcccacatcacctcggccaagctgtcggaatacccggcactggtgatcctgaactaaatgagaattatttttactcgatagtcggcagtggtacgtctcgtcttagccaatgcaactgattcctatttgattcagttcgcaactataagattcgtaccccggagcgctctcgatgtcctcttgtttcaaccgccggtcctcttcgcccgtcctgtccttgctgacggtcgccatcctgctggccggtgcgccaatgatgaccgccaccgccgccgaacctgccccacgcagccacggcaactacaacttcagcatcgagcagcaatcgctggtctccgcgctcaacgcttttaccgccgtgaccggctggcaagtcggcctgccggcggaactggcccagggtgtgtcgtcccctggcgtacgtggcccgttgccgccggaaaaggccctggaccggctgttggtggggaccaacctgagctaccgcaagctgagcagcaacaacattgttctcgaaaagcgcacggcgggcagcaccctcaacctgcaacaggtgaccatcagcgccacccgcaacgagcaggatgtaaacagcgtaccgagcaccgtcagcgtgcaggatcgcgaagaactggaccgccagaacgtcaacaacatccgcgaactggtgcgctacgagcccggtgtctcggtcggcggcgcgggcacccgctccggtaacgccggcttcaacatccgcggtatcgacggcgaccgcatcctcacccaggtggacggcgtggaagtgccggacaacttcttcaacggcccctacgccaagacccgccgcaactacgtcgacccggaaatcgtcaagcgtgtcgagatcctgcgcggcccagcctccgccctgtatggcagcagcgccatcggtggtgccgtgagctacttcaccctcgacccggacgacatcatcaagcccggccaggatttcggcgctcgcctcaagaccggctacagctccgccgacgaaagctggctgacctccggcaccgtcgccggccgcgtacaggacttcgatggcctgctgcaccttagccagcgcaatggccacgagaccgaatcctacgacggcaacaacgccaccggcctggcccgcaccggcgccaaccccgaggacgcgcgcaccaccaacatcctggccaagctcggctggaactatggcgatgacaaccgcctgggcctgacctatgagaagtacaaagatgatcgcgacgtcaacctgaagaacgccgtaggcggcccgttcatcggcggccgaggctttaacctctaccgtgatcgtcgtggcaacgacaccattacccgtgaacgtttcggcctggaaaacagctttgccctcgagtcaccgattgccgaccgcatcaagaccagcctcaactaccagatcgccaagaccgaccagaccaccgccgagatctatcagtcaggccgtcgtgtcttgcgcacccgcgacacgctctaccaggaaaaacagtggatcttcgacgcccagttggacaaagcattcagcctcggtgaaaccgaccaccaagtgacctacggcaccaccctcaagcagcagaaagtcaccggttcgcgcgagggcaacgcgacctgcgtggccgtcggcagtggttgcaccgccatcggcgcgcccagcccgattgccagcgacagtgtgaagaagtccagcgacttccccgatccgaccatcaacacgtattcgctgttcgcacaggaccagatcacctgggacaagtggaccttcctgcccgccgtgcgctacgactacacccagctcaaacccaagctgacccaggagttcctcaacaccgtcaacccgacaggcgcggacccggtgagcgacaaggaaaaaacctggcaccgtgtgacgcccaagtttggcctgacttacgccctgaccgatcaatacacctggttcggccaatacgccgaaggtttccgtacgccgtccgccaaggccttgtacggccgctttgaaaacctgaacctgggctacaccgtcgagccgaaccccgacctcaagccagaaaccagcaaaggcgtcgaaaccgggattcgcggcaagttcgacgaaggctccttcgagatcgccgtgttttacaacaaataccgcgactttatcgacgaagacaatgccgttgccggcggcagccttgaacagttccaggccatcaacatcaagcgcgccaccatcaagggcgccgaagccaagggccgcctgaacctggatgccttcggcgcgccgcaaggcctctacacccagggctcggtgtcctatgcctacggccgcaacgacgataatggcgagccgttgaacagcgtcaacccgctcaagggcgtcttcggcctgggctatgaccaggacaactacggtggcctgttgagctggaccttggtgaaaaagcaggatcgcgtcgacagcacgaccttccacgcgccggacggcgacaccagcggccccttcaagacccctggcttcggtgtggtcgacctgacggccttctacaaagtcactcaggacgtgaccatcaacggcggcctctacaacctcaccgacaagaagtactggaactgggatgacgtgcgcagctacgacagcgtcggtgaagccgctgtgaccggcccggccaacctcgaccgcctgacccagcccggccgcaactttgcgatcaacgtgatctgggacatctagcaacgccctactcacctcgtcgaaatttcatcgacggggtgaggattttttactgtgccgcgtcttcttgttcgtctagttgataacagctctctttcgggcactaaggcgtatcccttctcaaggactttttcatgaccgcttcccctaccgcagaacgcgcaagcctgcgctcccaacgcctgaaccagatcaccaacgagccgcacaccaagctggacgcactggtcaaggcccacgccccgtttgaaacccaggccaacttcgcccgtttcgtggtggcgcagtacctgttccaatcggaactggtagccctgtacaacgatgccgaactgatcaagatcgtgccggacctggccgagcgttgccgtgccgaagccgccaaacttgacttgggcgacctcgacaccgacgtacctgcaccggttgccggcgcagtgaaaaacccgagcaaggccgaagccctcggctggctgttcgtgtccgaaggctccaagctgggcgctgcgttcctgatcaagcgtgccgtgggcctgggcctgagcgaaaccttcggtgcccgtcacctgggtgagccggcgggtggtcgtgccgagggctggaaaagcttcacccgcaccctcgacgccctggaattcagcgccgaagaagaagccgccgtggaaaaaggcgcaatcgacgcgtttgtgcgcttcaccgtgttgctcgaacaggcgtacgctagcgcccctgaattggcctgacatccagattgaaatgccatcaactgtgggagggggcaagccccctcccacagttggcgctcacttcgcgacgctacaaataaaccatgacccgcaaaaccccttccacctcgaaaatcgcccggatcctcttcggcctgctggcctatgtcagcctgggcattgggttgatcgcgattgtcgtgccgggtttgcccaccaccgaattcatcctgctggccgcctgggccgccaccaaaagctcgccacgcctcagcgcctggctggagaaccaccggctgttcgggccgatcctgttcaactggcgcaacggcaagatcatcgctcgccgggccaaggtcagcgccaccgtaagcatgctgctgtgcgccgtcctgatgctggtgatgctcgaccacggctggccaatctacctggccattgccggaatgagcctgggcaacctgtggatctggtctcgacccgaacgactcgcacagcccgtatgacgttggctgtaggcattttcctaccactcatcgcctgctgctcatgaataaatttgttacgccgatgtttcagacatagcgctgaatggacttggcctgcactgcgtgccttccaacaagtccattcgcgagtgagcctatgttcaacaccctctccatccgcttgaaaatcgtgctgttgtccggcctttgcctgctgggggtgatagcgctggtcgtcagcatcaatatctacaacaccagccagaatgatctgttggtcagcgattccagctcgcgcatgctcaccgccagcgtggaacaactgctgcaagccagggccgccgagcaagcgggccagttgcagaaaaccttcggcgacagcctgatggcgctgaccgcgctggccgaccagatcaaggatttgcgcagcatggccagcaagcgtggcctggaagccggcacgctgcgcgaagaaatcaaccagagcctgaaaaccaccttcgatcgcaacagcaaagtgctcggtttctggctgtcattcgaacccaacggcctcgacggcaaagacagcgaattcgtcgatgacaaggcgcgcgcctccaacgaaaaagggcgcttctccagctattggagccgtgccggcggtgagggcttgaacaccatcatggtcgaagaagacctgaacaagaccagcctcaccctcaacggtacgccctacaacatctggtacacctgcccacgggacacacgcaatacctgcctgctggacccgtatgaagacacggtggcgggcaaaaaggtattgatgaccaccatcgcctcgccgctgatcgtggagggcaaactcatcggcgtcgtcggtgtcgacatcgccctcaccgccctgcaagcaaccgccgatgccgcacagaaagacctgttcaacggcgccgcacacctggaaattctgtccagcaccggtctgatcgcggcctatagcggcgaacccgccaaagtcggcaagaacctggtcgacaccctcggcgccgagggcaaggaaatcgtgcaactgctggccagtgacaaccgcatgatccgcgaacaggacggcaccatgcgcgccgtgtacccggtcaaaccgattgccgacgccaaaacctggggcgtggtgatcaagctgccaaaagcggtaatgctcgccgataacgtcaagttgcagggagtacttgacaacgctcaggcagccggcaccctcaaggccctgctggtagccgccgccgctggcctgctgggtttgctgctgatctggctgaccgccaccggcgtgacccggccgatcaacagcgtggccgccatgctcaaggacatcgccagcggcgacggcgacctcacccaacgcctggcctacgccaagaaggatgaactcggcgaactggtgaactggttcaaccgcttcctcgacaagctgcaaccgaccatcgcccagatcaagcaaagcatcaccgaagcacgtggcaccgcagaccagtcttcagccatcgcacgccagaccagcgaaggcatgcaggtgcagttccgcgaaatcgaccaggtggccaccgcgtccaacgaaatgagcgccaccgcccacgacgtcgccaacagcgcgtcgaatgccgccagcgcggcacgcggtgccgaccagtcggcgcgggaaggcatgtcgatcatcgagcagagcacccgcgacatcaccaccctggccgaagaagtcagcaaggccgtgggcgaagtcgaagcgctggcggtcaacagcgagcagattggttcagtgctggaagtgatccgcagcattgccgagcagaccaacctgctggccctcaatgccgccatcgaagccgcacgcgccggggaaagcggccgagggtttgcggtggtggccgacgaagtgcgcaacctggccaagcgcacccaggattcggtggaggaaatccgtcaggtgatcgaacgcatccagagcggcacccgtggcgtggtggcgaccatgcattccagccagagccaggcccagaacaatgccgggcagatccatcaggcggtgcaggccttgggcaagatcagcgatgcggtcaccgtgatcagcgacatgaacctgcagatcgccagcgccgccgaacagcagagcgccgtggccgaagaggtcaaccgcaacgtctcggcgatccgtaccgtgaccgaaaccctcaccggccaggccaccgagtcggcggcgatcagcagccaactcaatgcactggccagccagcagatgaagttgatggatcagttcagggtgtaaacccaatctcaaaaacaacacagttccaatgtgggagggggcttgcccccgatagcagagtgccagtgaacgcctctgtagctgacacacccccatcgggggcaagcccctcccacagttggttcactttggatttagagaccggtccaggcactgacaaactgcgtcaggtcttctttagcagcagtacgcggcgggttctgcggcgtgcccaggtacaggaagccaatcacctcctcatccgccgtcagccccaggcctttggccacatgggccgaataggacaactcaccggtgcgccacaccgcaccaatcccctgggcataagccgccaacagaatgccatgagccgcacaggcagcagccagcagttgctcggacttcggcaccttgaagtgctcctgcaaacgagcaataaccaccaccaccaacggcgcgcgcaacgggccgttctgggccttgtcgatcaccgcttgcggcgcatcggcgtcttgcagccgggccgcttcggccaacaaagtgcccatctgctcgcgggcagtgccttcaaccgtgaggaaacgccaaggccgcagttggccgtggtcgggcgcacgcatggcggcggcgaacagcacgtcgcgctgctcctgggtcggtgccggttccagcagacgcggcacggaaacacggttgagcaaagcgtcgagagcctgcatgggccacctccagaaaaaaatgtgcggtcattctagcgggaatgaatcgggatgccaccaaacgataattgctcttattcattgcgccctgccctgttagactttgcgaccctattttcagcagtggttcaggaaactcgatgttccgttcgctttttcgcctgtccgcagcattgctggccttgagcctggctggctgcgatgacgcgcccaggtttaccaaggccgagccgggtgaatcacgggcgggcggcgctgcgacggtgaacaagcgcgaccagaacgcgttttccctgccctcggccaacctgtcgcccacgcggcgcctggacttcagcgtcggcaacagcttctttcgcagcccctgggtgatcgcaccgtccaccaccacggcgcgtgatggcctaggcccgctgttcaacaccaatgcttgccagaactgccatataaaagacggccgtggtcacccgccgctgcccgatgcgcccaacgcggtgtcgatgctggtacgcctgtcgattccggatacgcccgcccatgccaaggccatcgagcagattggcgtggtgcccgagccggtctacggcgggcaattgcaggacatggcggtgccgggcgtgccgccggaaggcaaggtgcgcgtcgactacacgccggtcaacgtcaccttcaaggacggcacggtggtcgagttgcgcaagcccgacctgcagatcacccagcttggctatggcccgatgcaccccgacacgcgcttttctgcgcgcatcgccccgccgatgattggcctgggcctgctggaagccatcagcgacgccgatatcctgcgcaacaccgacccgaagaccgccgccaagggcgccatcatcggtcgcgccaattgggtctgggacgacgcccagcaaaaaaccgtgctcgggcgttttggctggaaagccgggcagcccaacctcaatcaacaaaatgttcacgcgttctctggtgatatgggcctcaccacgtccctgagaccctttgatgactgcaccgatgcccaagtcgcctgcaaacaggcccccaacggtaatggccccgatggcgagccggaagtcagcgacaacatcctgcgcctggtgctgttctacacccgcaacctggccgtacccgcgcgccgtggcgtcaacacgccgcaggtgctggccggtaaaaacctgttctatcaagccggctgccagggttgccacacgccagcattcaccacggccgccaatgccgccgaacctgaactggccaaccaggtgatccgcccctacagcgacctgctgttgcacgacatgggagcgggccttgccgacaaccgcagcgaattcaaggccggtggccgcgactggcgcacgccgccgttgtggggcatcggcctgacgcaaaccgtgagtggccacacccagttcttgcatgacggccgcgcccgcaacctgctcgaagccgtgctatggcatggcggcgaagcccaagcggcgcagcagcatgtgttgtccttcaatgccgagcagcgcgctgcgttgctggcgttcctgaattctttataagcttcgccccacttacagaagggagctcgacatgttccgtcccaagttgttgttcaccagcctggccgccctagccctcggcgcctgctcgccgcaagacccgcaagcggtgacctcggcggccatcgccaagcaagtgatcctgccgacctacagccgttgggtcgaagccgaccgccaactggccgtcagcgcgctggcctactgccagggcaaggaaagcctggacaccgcgcgtgccgacttcctgcatgcacagaaggcctgggccgagttgcaaccgctgctgatcgggccgctggccgagggcaaccgttcgtggcaggtgcaattctggccggacaagaagaacctggtcggccgccaagtcgagcaactggtcgccagccaaccgcagatcgacggcgccgccctggccaagtccagcgtggtggtgcaaggcctgtccgcctacgaatacatcctctacgacgccaagaccgatatcgccgacgacgcgcaaaaggcccgttactgtccgctgctggtcgccatcggtgaccgccagaaggccctggccgaagagatcctggccagctggaacagcaccgacggcatgctggcgcagatgaccaagttccccaaccagcgctacgccgactcccacgaagccattgccgatctgctgcgcgtgcaggtgactgcactggacaccctgaagaaaaagctcggcacgccgatgggccgccagaccaagggcatcccgcagccgttccaggccgatgcatggcgcagccagtcgtccctgcaaagcctcgaagccagcctggcggcagcccagaccgtgtgggtcggcgtcgacaacaaaggcctgcgtggcctgctgccgtccgagcagaagccattggccgacaagatcgacgccgcctatgccgcgtcgttgaaactgttcgccagtaaccagcgcaccctcaatgaactgctggccgacgacgccgggcgccagcaactcaacgatatctacgacagcctcaacgtcgtccaccgcctgcatgaaggcgaactggccaaggcgctgggcatccaactgggctttaacgccaacgacggtgactgatgatgctcaggcgacaggctttggccgttggtagcgtgctgctcagtgcactcacactgggcggctggacgctgttcaaaagcaaagacaagggcccgctgctgctctcggcgcgggatgatgcagacggcaagcactacgccgtgggctatcgcctggacggcaagccggtgtttgccacccaggtcggccagcgctgccacgacatcatcaaccacccgacgctgccgattgcgctgtttgtcgcccgtcgcccgggcaccgagagttacctgatcgacctgcgcgatggcgcgctgttgcaaaccatcacctcccacgtcaaccgccacttctatggccacgcggtcatccacaagagtggcgactggctgtacgccaccgagaacgacacgtccgaccccggccgtggcctgctcggtgtgtaccggttcgaaggtgagcggctggtgcacagcggtgaaatctccacccacggcatcggcccgcaccaggtgtcgtggatgcccgacggcgaaaccctggtggtggctaacggtggcattcgcaccgaagccgaaagccgcgtggagatgaacctcaacgccatggaaccgagcctggtgctgatgcagcgcgacggcaccttgatcagcaaggaaaccctcggccagcagatgaacagcgtgcgtcacatggggatcgccagcgatggcaccatcctcaccgggcaacagttcatggggccgtcccaggagcgctccgagttgttggcgatcaagcgtccagggcagccgttcgtggcgtttccggtggccgacgagcagttgcaggcgatggggcactacaccgccagcgtggcggtacacagcgaattgcgcctggtggcgttgaccgcgccgcgtggcaatcgcttctttatctgggacatggacagcggcgagctgcgcctggatggccccctgcccgactgtgccggcgtgggcgcggtcgaggatgggtttgtcgtgacgtcgggccagggccgttgccggttctacgattgtcgccagaaacagctggttgcaaaaccgctggaattgccggcagggctctgggataaccatctgcatctgatctgagttcgcgtcgcttttcacccgacacgagccggatgccaacccaaaaaaaaggcctcgcaacgcgaggccttttcattttggttttaaactcatcaactctgtggcctcatcccttgagacattccaaacatgaacagcaataactcatgatcaggcttggccgccgtgctcgctttggcaacgcgcggcaataggcattgcgcgccaccctgcgttgcactgagcacctgtgtgcgaggctgttcccacgccgccagcgccaaggctgcgatgcccagcgctccgaccaaaaacagacctcgtgctatttctagcttcatctggttaaacccttgatagcgctgccaaacgccgtctcgtaaaagtagctgagtttcttccagtcggtatcgttccacgacgaatggcggcgcaattgcagcatgtcatgggaggcggcccgataagcggtcaggcgctggcgacatttctcgaaatccagcagcgccacttcgacgttggccgagtcaccctcgcccgtcacccgcacgaagatgtgcttgatgtagaggcagccatgttgccatcggcccttgtgcatgcgcgccagggtgccggccagttccttgagtacacgctcatgcaccagttcgccgtattgctcgcggccaccggcggcgtaccagttctcgatttcgtcgaaaccgtcgagagccgcagtgaccaacagcgctttccattggtgctcggggtcgcggcgcgcttcgcaaaacaccatttccggcacacgcacgtccaaaaggcgcaggcccttgatcgcatcgcgctcgcgcagcaccgtcgggcggccaaacggatgcagccaactgcggtagatgtgcccggtctggcgtttgctgtagagcaagcggccgttggggctgatcacacgctgcacaccgctttcaccaccacgccgacggttgggctcttcgacccactcgccctgctggcgccagaaataatcaaagcgttcttcgggcgctacatgactgcctgctacgcactcaactgccatcctgttacctcttgcgcaatacatacactcgccacatggcgtagagcggtatgaagtccagggattcctgaacacgaaaaccggcttcctcaaattctgcttcaacagtagcagccggtaacacaaacctgttttggtaaccttcctgctcaccttttacacgacgttgctgttcaagacgcttgcgtttccaggccttgaaattgccgtctacccataacgaaataatcacgctgtcacgggtaacgcgttgaaactcccgcaatatggccatgcgatgtgccgggtcaccaatgtggtgcaacaggcgcatacagaaaatgctgtcgaccgcgttatcttgcagatcaatatcaaaggcagatgtctgcaagggccgtacccgtttcaccacatcggcgggctgagcggccatcgccaccttcaacatggacgccgaattgtcggcaccgatgatcacgcggttgggtttttccgccagcaagggccagaaacgcccagcgccgcacggcaagtccagcactaggccaggctcacccgccatcgccagcgcaccacgggccaattgctcgtcgcgtttgtgggacaaccggcgcgccagattgtcctgatgcttgagcaaatattcctgagcgtgttcgtcgtcgtacttttcggaaaattcgagcttgatcggatcagacatcaacggatctccagtagctgatgcctacaaccttaagcagcgcactgtgatcaacaggtcaacccgttgtgaaaaacttgtcctgtccaatctcatacatttcaagactttacagacacaagcgatagcatggggccatcttcgccgaattaccgggatctctggcaggatagcggcagggggtggagtcaggcgttgacctgactcaattgcacatgaaagcggcagccgttgggctccatggtgctgaggctgacgctccacccctggttctcgcagatacgctgcaccagcgacagccccagccccaggccctcaccgcgcttctcgctgccgcgtacgaacggctcgaacatcgcctcgcgcttgtcctcggggataccgacaccgctgtcctccacgataaatccgctcggttccagggtgagtcggataaacccctgctcggtgtagtgcagggcattgcgcagcaggttgcccatcaccgcatgcaggaaggtggtgttatagcgtgtatccaggggattgccgggctggtagatcagctccaggcctttgtgctcgatgggctcacgccagatgccgagcagatcatccgccacctgcgtcaggctgacctggggcgacatcgccgcgtcgttgtgctgggcacgggccagcatcaggaaggtctgcaccagttcgcgcatttcttcgcaggcccgagcaatgcgcaatacctggttgcgcccgcgctgatcgatagcggggttttccagcagcaattcacaggagctggccagtaccatcaaaggcgtgcgcagttcatggctcacgtcactggtgaacagctgttcacgggacagcgcctggcgcagccgtcccagcgtggcgtcgaacgccaccgccagctcacccacttcatccgcagcgtaatccggcgccagaggcggggccaagccgagcagttggtcgcggtgacgcacctggcgggccaggcgcaccaccggcgccattaccttgcgcgccagcacccagccgaggaacaccgccagcgccaggctgagcacaaagcccaccagcaccacggcgaacaacacgcgctcgcgctcttcgaaatcgctttgatcctgcaacagcacgtagcgccgcccatcgaccacttcgaccatggcgtggtacgacagcgcctcgcggaatacttcatggaaaccgggctcaaggtgacgcaggtccttgggcaactcgaagtcgccggggccgccgctgaaataaaatagctggtctggctcgggccggtgccgccagtcctcgacggtgtccatcagcagcaggcgttgcaagtcgccgcccaggcccgccgagatcaacttctcttccaccaggtgcaccgtcgcgacaatgcccatggcgaaggcccccgccaccaacgcactcatcaaggcaaaggcgatgatgatccgttgcgcaaggctttgcttaaactccatcacgaccctcggccaggcgataacccacaccgtgcaccgtttgcagcaacggcttggcgaacggcttatcgatcacttggcgcaattggtgaacgtggctgcgcaggctgtcgctgtccgggcagtcatcgccccacagggcttcttcgagaatttctcggcgcagcacgtgcgggctcttctgcatcaacaccgccagcagcttcaggccgaccgggttgagcttgagcaggcgcccttcgcgggtgacttccagggtatcgaggtcgtagctcagatcacccacctgcagggcgcggcgaccgccgccctgggcacggcgcagcacggcttcgatgcgggcggccagttccgacagggcaaagggcttgagcaggtagtcatcggcgccggacttgaagccctgtagccgatcgtccagttggtcgcgggcggtgagcatgatcaccggcgtatcgcggcgggcatcttcacgcaggcgcttgcacagggtgtagccatcgatgccgggcagcatgatgtcgagcacgatcaggtcgtaatgctcggtggcggccaggtgcaggcccgacaaaccgtcctgcgcacagtccacggtgtagcccttgagccccaggtaatcggccaggttggccagaatatcgcggttgtcttcaaccaatagaattcgcatgggcagtgtctccgtacgcggtaacggccgtgttggctcgcgcagcttaaggccaagtgtggctcagggatagacccgcaagggccgtcgataaaggttttcaaccgatattttagttgaacgagattttcactatagcttcacaaactgactacagtgtcagggcgaagatcgcgcccatcgatataaggaagttggacatggggtttctcaaaacagcgcctatgcgctatttgctgttggtcaccggtgcctggctggttgtgttcctgctcacgcgcagcgtgttgctcattactcacctggatgaagtcggtggcaacctgctgccggtgtttggcgtgggcctgctgtacgacctcggctttctggcctacgcggccctgccactggggctgtatctgctgctatgcccacccgccctctggcgccgtcgcggtcaccgctggttcctgcaggcggtgctgaccgtcagcctgttcgccatgctgttcacctcggtcgccgagtggttgttctgggatgaattcggcgtgcgcttcaactttatcgccgtcgattacctggtgtactccgatgaggtgttgaacaacgttctggagtcctacccgatcggcaagttgcttagcctgctgacgatgctcgccgttgtgttgagcctggccctgcgcaaaccgttcaacgccgcgatgaatgcaccgctgccgacaatgcggggtcgcctggtcaatgccctgggccttttgatcgttgccggcctcagcctgcaactgatcagccaggacagcccgcgcgcccaaggcggcaacgcctacaaaaacgagctggcgagcaatggcccgtatcagtttttcgccgcgttccgtaacaatgaactggactacacccagttctataaaagcctgcccgcggatgtcgtcgccaaacagttgcgcgccgaactgagtgagcccaatgctcgcttcatcgacaaggaccccttggatatccgccgcgccatcgacaaccccggcacgccgcgcacacccaatatcgtgctggtgaccatcgaaagcttcagcgccaaatacatgggcagcaacggcgacgagcgcaacctcacgcccaacctggatgcgctgcgcaagcagagcctgtacttcaataacttctatgccaccggcacccgcacggatcggggcctggaggccatcaccctggcgatcccaccgacaccgggccgctcgatcgtcaaacgcatcggccgcgaaagtggcttcgccagcctgggccagcaactcaccgccatcggctatgacagcgtgttcgtctatggcgggcgcggttacttcgacaatatgaatgcgttcttcagcggcaacggctatcgggtcgtcgaccagagcagcgtgcccgaatcggagatctcattcaaaaacgcctggggcatggccgacgaagacctctacaaacaaaccctgaagctggccgatgccgactacgccaagcagcagccgttcctgctgcaactgatgaccacctccaaccatcgcccctacacctacccggatgggcgcatcgatatcaaatccggcaacggccgcgacggcgcggtgaagtacaccgaccacgccatcggcgaattcctggaggcggcacgccagaagccgtggttcgacaacacgatcttcgtgttcgtcgccgaccacactgccggcagcgcgggcaaggaagacttgcccatcagcaactaccagattccgctgttcatctatgcgcccaaactggtcgacgcccgggaaaccgcgcaactggccagccagatcgacctggcgcccaccttgctcggcctgctcaacctgagctacgaatcgaccttcttcggtcgcaacctgctgcaagacaacccactgccaccgcgtgtggtggtcggcaactaccagcacctggggctgtttgacggcaaagacctggcgatcctcagcccacgccagggcctgcgtcgccacgatcaggccctgggtgaaagccaggagctacgggtgggcagtgatgacccgctgatcctgcgcgccatcgcctactaccaagctgccagctatggcttcaaacagcagttgctgggctggaaagcgccgaaggtcgcagaacccgccgtcagcgcccgctgatcgccacgcgtggcccttgcctcctgcggggcaagggcgtaacacttgcgcccattctccggcgacgacgccctttcatgtccgacaccctgctgctgatcgaagatgaccgcccactggccgcgctgacggcggagttcctgcgcgccgagggattcaacgtggcggtggagcaccgtggcgaccgtgccgcccagcgcattcttgacgaacaaccggcgttgttgatcctggatgtgatgctgcccggcatcgacggttttaccctgtgccgacagatccgcgagcagtaccccggcctgatcctgatgatgacggcgctggacgaaaacgccgagcaattgacggggttcaacgttggtgcggacgattacgtggtcaagccggtcgacccgctgttgttgctggcgcgtatccgctcgctgctgcgtcgccatccccaggcgccccgtgcgtcttaccaatggggcacattccgcttggacctcaacggccatttcgcctggctcgacgaggtgcccttgcagttctcggtggccgagttcgagttgcttgcgatcttcgcccgccactgcggtgtgttgctgacccgggaaaaactcctgcaaagcctgcgcggcctggagtacgacgggctcaatcgctcggtggatatgcgcgtgtcacgtctgcgcaaaaagctgatgagcctggggtgcccggtgacgatccagaccatcacggcccagggctacctgtttgtcgaaacaccgcaagaggcccggcatgttctctagagtgcgaccctggatggcgattctcgcgggcactggctggggcgcattcaccctgtatttgctgtggctgtgcgccaatgcctcggtatttgtcggcgaatacagctttttgcgcttgatggccgggccgggctatctggtggcggagcaactcaaggccctgccggccgaccagcgtgaagcccgtatggaggtactgcgcgcgcgcttccagtacccgatccgcctcgtcaccctgggcgaggtcgaactgccgcccgaagccctgatcatgctgcaacaccagcaaccggcacagagcagcgatgaagacatcacctatttcccattcgatgacaaaacgctgatccaattcggtccgatgtggggaaccgccgaggtcaaggacctgctgcaattcccggtgtatgggatcaccgcgtgcgtggccgccctgccgctgttgctgtggatgtggttcggcctgcgtgcacgccgccaacgaaatgctgatctgctggtccttgatgcctgcctgggcaccctggcccgcacgcccaacgcgatgctgccggccatgggcaaggaatgggcgcccgtgctgcagaccttgcagcaacatgcccaagacatcaccgccatgagcgaacgccaccgggaggtttcccaggccgtctcccatgagttgcgcacaccgttggcccgcatgcgcttcgctttgaccctgctgagcaaaagcgacgatcccgccacccgcacgcgcttgcaggaacgcctgcaaaccgatgtggaagagcttgaagccctggtgcgcgccagcctggcctttgcccgcatggccggcgcgcccaccgacctgcagcatgagcccatccctatccgtgactggttgcatcaggagtttgccttgctcgacgggcatcagcggcgcctgagcctggacaccgagccggcggacctgcaactgatcggcgaccgcgccttgttgcacttgatcgtgcgcaacctgttgagcaacgccatcacctacgcccgcgaccaagtgagcgtcagtgctgcccagcaggatgaccaacacctggtgctgcatgtggacgacgacggccccggcatactcgccgaaaaccgcgaaaagattttcgaaccgtttgtgcgactggccatgggcggcgatgagcccggcggcttcggcctcgggctggcactggccaggcgcgccacccaatggcatcgcggtgagctgtctgtggcgcgcagcccgttgggcggggcacgcctgaccctgatcctgccactgcgcccccagtaaccttcgtgttacagcctgtgacagtgaaccgctggcattctccgtaatctcgccacctgatccagggttgcccctgcgccctgggtccccgtcctttggacccggttggagagcccgttcatgcgtcccccaaaacagcatttacccacgttgatgctatcgctgtgtatcgtcgccagcgcgctgctgaccagccaagcggctgccgtgagccgcgcagcgcctgacttcactggttcgatcaagtcgcccggctacgactcccacacccttaaactgctgggcgaggtgaccatgtccagccgctggcggcggcccatacccaggccacgcactaaagccgcgactctgtctgcccaagggccgctcggccacacgtctgcaccgtggtcctctgcacgtgtgccctcggcgcttgccagagggatgaccttcaagaggctgttgcgacgcggcggcatgggctgaacgctcaaccaagcataaaaaaaccccgcctgcatcactgcaggcggggttttttatgagccgggtaaggctggcttacatcatgccgcccatgccacccatgccgcccatgtctggcataccgccgccagctgcgccttcagccttaggcttgtcggcaattgcagcttcggtggtcaggatcagaccgccgatggaagctgcagcttgcagcgcggaacgagtcaccttggttgggtccaggatgcccatttcgatcatgtcgccgtagacgccagtcgcagcgttgtaaccgtagttacctttgccgttcttgacttcattgaccacaacgcttggctcgtcgccggagttggcagcgatctggcgcagtggcgcttcaacagcgcgacgcagcacagcgataccgacgttctggtcagcgttgtcgccggtcaagttggtcagggcttccagagcacggatcagcgcaacgccaccgccaggtaccacgccttcttcaacggctgcacgggttgcgtgcagggcgtcttcaacgcgggctttcttctctttcatttcaacttcggaaccggcgccaaccttgatcactgcaacgccgccagacagcttggccagacgctcttgcagtttttcacggtcgtagtccgaggaagtttcggcaacctgggcacggatctgagtgatgcgcgcctggatgtcctgctcaacgccagcaccgtcaacgatgatggtggcttccttggagatggtcacgcgcttggcgctacccaggttttccagggtggcgctttccaggctcaggccgatttcttcggagataacggtaccgccggtcagaacggcgatgtcctgcagcatggccttgcgacggtcgccgaagcctggcgccttgacggctgcgactttaacgatgccacgcatgttgttcacaaccaacgtcgccagggcttcgccttcaacgtcttcggaaacgatcagcagtgggcggccggctttggcaacggcttccagcacgggcagcatttcgcggatgttggagattttcttgtcgaccagcaggatcagcgggctgtccagctcggcaaccatggtttccggcttgttgacgaagtacggagacaggtagccacggtcgaactgcatgccttctacaaccgacagttcgttttccaggccagtgccttcttcaacggtgatcacgccttctttaccgactttttccatggcttcggcaatgatgtcgccgatggagctgtcggagttggcggagatggtgcctacctgagcgatagccttggtgtcggcgcatggcttggacaggtttttcagctcagcaacgatggcgatggtcgccttgtcgatgccgcgcttgaggtccatcgggttcatgccggcagcaacggccttgtagccttcgttgacgatcgcctgggccaggacggtagcggtggtggtgccgtcgcctgcgtcatcgttggcacgggaggcaacgtctttgaccagctgcgcgcccatgttttcgaaacggtcttccagttcgatttctttggcgacggaaacgccgtccttggtgatggtcggagcgccgaagctcttctcgatgatcacgttacggcctttcgggcccagggtcgcttttactgcgtcagccaggatgttgacaccggtgagcattttcttgcgggcggaatcgccaaatttaacttctttagcagccatgatcgataatccttaaatactttggagtaacgggaaaatgagcggggaaattacgcttccagtacggcgagaatctcgttctcagccatgaccagcaggtcttcgccgtcgattttcacagtgttgctgccggagtaagggccgaatacaaccttgtcaccgactttaacggccagagcacgcacttcaccgttttccagggtcttgcctgggccagcagcgacgatcacaccgtggttggctttttcagcagccgaacctggcagaacgatcccgccggcggttttcttttcttcttcgctgcgacggattacgacgcggtcgtgcagaggacgaagcttgctcattgtcgatctctcctaattgtgtttttcatcggccggtgtctgtaccggcgggttgtattccggctgtgccggtcgcgcctcgccaagcaagacgcggaagtctgtctggtgtcgccaccagaaaccttgcggtgaccgttacataagggcgcataagcttattacaaggggccgcggcggaaattttttgcaggcgccgacggttgaaagcaacacggcacccgaaggtgccgtgccaatgaagcggttatttgctgtcgcggtgttcgaactcgccttcgatcacatccccttcacgccccagcggctggcgtggagccggtccgccacggggttgcaggtcgtcggcaaaggctcgctggcgaatcgccgcctcttcggcgcgctggcgcatcttgccggccagcagcttgcgggtgaacggcagcaacatcaccagacccaccacatcgctgatgaagcccggcaggatcaacaggccaccggccagggccatcatcaggccttcaagcatggtctgtgcgggcagctcgccacggttcaggctttcacgggcacgcagcgccgtggccaggccggcgacgcgcagcaccagcacgccgagcatcgagccgagaatgatcagcaacagggccgggaaaaacccgatcgcgctgctgacttgaacgaatacgaacagctccaacaccgggaacagcagaaagagcaataaaaaagggcgcatcaaatggttcctcaacgcaagaatgccttgccagtccaccttagatgacgtcgccgtttcgtgaattcaagcgtcagcagtggcttttttcggccaggcctcggcatgggccaatgaaaccagggcttcgcgtacttgtgtcggcgtgttgcaaggctccgcaaacggcaaccaatataaggaatggccgatacgcaagtgcatgccttcgctgtcgatgccggctaattgagcgggctcggaagtcggcaaaccgccgagatcgacgtaatgggcaatggccttggtgtgatcgctgttcatgtgttcgatcatgctgcgctcggccttgccggcgaacggattggccaggttcaactggtcgatccagtgaatcgccccaaagccaccgatgtaacggtggcgtacgggcttgagtacccagaagtcgaagtcgtgggccttgtggtagttggcggagtccgggaagtagcggtagtaacgctcggccgccgcctcgatggccgcgccctcctccagcttttccgcttcggccaggtaggtcaggcgcccgacggcctgcacgtcatcggcctcacgctcaccgaccagcaacgaacacttggggtctttctgcaggttatgggtgtgctgtgcgatgcggctgatcaggatcaacgggcgaccctgctcgtcgaggcaatacggtacgaccgagccgaaagggaagccaggcatggctttggataaagtggagagagccccacggtattccttgagcaacagctctcgggcgttcttggcaacctgtgcgctcaacgtatgactcctcgggtattcagccgcccatggcatatgggaatggatctcaacgcaaggtaatcatatccgcaaaggttgccaagcaggttttgtgcgcccgtgttaccaggccacaccgaaaccagcggtgtagcgggtcttgctcaggctgctctcggagtcgccgctgatgatgtcgcgctcggccttgaggttgagggaggcccattcggtgactttgtagcgcaggcccatttccgcatccagggagtaatccacgggcccatcaatcggccggcccagttcaccattggtgaagaactcaaccgtcttgcccaccaggtagcggttgtagttccacttcatggccaccgagtagaagttgtctttgccaccctcggcatattcatagtcagtgcggttgaccagcgaaccgagggagaacgcgcccagttcatcatcccagaactggtagccggggccggtgccgacggtgcgctggcgggacaggtcttcgaccttgtcgcgcttgtaggtcaagcgtccctgccagaaccaatgctcggtgaggaaacggtccaggtcgtattccagggcccagttgtcggtggtggtgacatcgtcctggaactcacggttgtattcgccctggccggtgtggcgccactggccatgccgcgccgtggtcttgaagtcgatgtcgtagtcgttggtgtctttttcggcgcgcttgtagtccagcgccaggtcgacattgcccttccacaccaggtcttcgatcaccggcttgggcttgatgatctgctggatgcttgccaagtccaccgtcttgggcgcctcgccgttggccagcaccaccttgccatcatccgctgccttcagagacttggccttctcgccggtgtaggcgtcctgtttgaccaataattcctggtcgctctccagggttttcacctgcttccagtccacggggatggcaccggcgtagtcggtctggatcagcaatttgccgccatcgaagactttgatcttgccggtcaggcggtcaccgttcttcaaccagacggtgtcggccagcaagggcgtggaggcgctgaaaacagcaaggcacagcagggttctggacaacataagcgggtatggggctcaaggttggcgaaaaggaggcattatcgtgttagatagctaggactgactcaagtatcggggtcgagttcaatgctcatcgccatgtttacagacgtttcttacaaaaatgccgacgatttcaacggatagccgcgcaatgaatcaaccagccgagtcgccgcaaagccctgccgagatgcgccgtactgcgctgtacctgaccctggcacaagtgccaccaggctgcgtggtgagttacggcgagctggctcacctggcgggcctcggccgtgctgcgcgctgggtgggtcgtacgttgagccaactgcctgaagacaccaggctgccgtggcaccgtgtgctgggtgccggtggtcggataagtctgccggtgggcagtgcttcaggcgacgaacaacgggcgcgtttgcgcgacgaaggcgtcacggtccgcaacaatcgcgtggatattcagcgccatggctggcgcccggtagagcacagcggttagagtgcgcgctttgtttccgcaaatctgaggcagactccagcccatgccccgtaaaacctggcgcgccgcgctcgctgcctatgccagcccttcgacgttagtcctgttgttgctcggctttgccgccggtctgccttacatgttggtgttctcgacgctttcggtgtggttgcgcgaagccggtgtggcgcgcgagaccatcggctatgcgagcctgatcggtttggcgtatgcctttaaatgggtctggtcgccgctgctcgaccaatggcgcctgccactgctcggtaaactcggacgccgccgttcctggctggtgctggcccagtcgctggtgatcctcggattgatcggcatgggtttctgcgacccacagaaacacttgtcctggctgatcgctatcgccgtcatcgtcgccttcgcctccgccacccaggacatcgcggtggacgcctaccgcctggaaatcgccgacgacagccgccaggccgcgctggccgccagctacatgtccggttatcgcatcgccgccctgctggctacggcaggcgcactgttttttgccgaagggttcggctccaccggtttcaactacaagcactcggcctggaccggcacctacgtgctgttcggcgtactgatgattccggcgctgctgaccacgctgttcatgcgcgaacctgatgtgccactgcgcacccagttgcaggccgggcgctacagcttcgtacaccaactggcatcggtgtttgtgctgatcgtgctgctggtatcggtaccggcgatgtttacccagttgttcaacacggacttcggcagcgtgatattccacggcgtgagcctgtgggacctgctgatggaagaccgcgccttcctgcgcgccatcctctatataaccctcacgtcgctgtgcctgtcggccatgggtcgccggggtctagcgccggtgctgacaccggtcaacgacttcatcctgcgttaccgctggcaggcattgctgttgttggggctgatcgccacctaccgcatgtccgacaccgtgatgggcgtgatggccaacgtgttctacatcgaccagggcttcaccaaggaccagatcgccggcgtcagcaagatcttcggcctgatcatgaccctgctgggtgcaggtatgggcggcctgctgattgtgcgcttcggtatcctgccgatcctgttcatcggcggcgtggcgtcggctggcaccaacctgctgttcgtgatgctcgccgacatgggcccggacctgcagatgctgatcttcaccatttccctggataacttcagctcagggctggcgacctcagcgttcgtggcgtacctgtcgagcctgaccaacctcaagttctccgccacccaatatgccctgctcagctcgatcatgctgttgctgccgcgccttatcggcgggtattcgggggtgatggtggagaagttcgggtatcacaatttcttcctgatcacctgcctgctgggcgtgccgacgctgttcctgatcgcgttgcactggttccaggaaaatcggcgggcgcggttgagtccaccgaccgaagactgacaatgagggaggggcttgcccccgatagcaggttgtcaggcgcttatgtgttactgatccaccgctatcgggggcaagccccctcccacatacccctctgcgttctgatgcctgtactccagcagccggcgcccgtacaatcccaagtcatttcaagtccaagcaaccgacaacggcctaccatgcgtaccagtcaatatttgctcgccacacagaaagaaacgccttccgacgcggtcgtgatcagccaccagctgatgctgcgcgccggcatgatccgcaaactggcctccggcctctacacctggctgcccatgggcttgaaggtgatgcgcaaggtcgaagccatcgttcgtgaagaaatgaacgccgccggctctctggaagtgttgatgccgagcacccaaccggctgaactgtggcaggaatccgggcgctgggaagagtacgggcctgagttgctgcgcttcaaggatcgccatggccgcgatttctgcgccggcccgacccacgaagaagtgatcaccgacctgatgcgcaacgagctgagcagctacaagcagctgccgctgaacctgtatcagatccagaccaagttccgtgacgaaatccgcccacgcttcggcttgatgcgcggccgcgaattcatcatgaaggatgcctattcgttccacgctgaccaagcgtccttgcaggtcacctacgaccgtatgcaccaggcctactgcaacgtgttcacgcgcctgggcttgaagttccgcccggttgaagccgacaacggctccatcggcggcgccggctcccacgaattccacgtgctggccgagtccggcgaagacgacatcgtgttcagcaacggttccgactacgcggcgaacatcgagaaagccgaagccgtgccacgggaaacttcccgtccagccccggccgaagagctgcgtctggtggacacgccggataccaagaccatcgcggccctggtggaaaaattcaatctgccgattgaaaagaccatcaagaccctgatcgtgcgtgccgaggaagaaggcaagctgattgccctggtgatccgtggcgatcacgagctcaacgaaatcaaggcggcccagcaacctggcgtggccagcccgctggtcatggccaccgacgccgaactgcgcgacgccattggcgccggtgccggttcgctcggcccgctgaacctgccgctgccgatcatcatcgaccgttcggtcgagctgatgagcgacttcggtatcggcgcgaacatcgacgacaagcactacttcggcgtgaactgggaacgtgacctgccggtgccgaccgttgccgacctgcgtaacgtggtagctggcgacccaagcccggacggcaagggcaccctggaaatcaagcgcggcatcgaagtcgggcacatcttccagctgggcaacaagtacagcaaggcgatgaagtgcgaagtgctgggcgagaacggcaagccgatcaccctggacatgggctgctacggcattggcgtatcccgcgtggttgccgctgccatcgagcagaacaacgatgacaaaggcatcatctggagtgacgccctggcgccgttccaggtcgccctggtgccgctgcgttatgaaaccgagcaagtacgcgaagccaccgacaagctgtatgccgaattgacggctgctggttttgaagtgctgctggatgaccgggacaagaaaaccagcccgggcatcaagttcgccgacatggaactgattggcatcccgcaccggatcgtggtcagtgaccgcggcctggcggatggcaatctggaatacaagagccggaccgaagccgaagcccaaccgttgccggtggctgacgtgctgtctttccttcaggcgcgtattcgtcgctgaaaaccagatcaagagaagtcatgttcaagcgaaacaccagagccctggggggcgccgccttgtgcggcgccctgctggtcagcggctgcgccaaccagatgtcgcaacgcagtgagcacgaagagcgagtcgagcgtaagttgctcgaccacagcctgcagatcgatgtaggcgagcccaaagtgctggagctgccgcaacgccgggttcgcattcacgagcagaagaccttcgaggtcaccgagttcgaagtcacccgtcgttacgaccgctataccccctaccagccctggcgcaagctctacgagatgccattgggtgcggttgccctggtggcgggcgcgggtgccaacgtggcgaatatcttcgccctcggccacctgccgaccagcatgacccatgactggctgacctatggcgtggacggcctcaacccgttcatgaacgtgcaatcccacggccgtgcacaacagaacctggcgggtatcgatgaagtccagcgcgacaagcgcgtggagtattcgagcctgccctggagcgagcgcccggtgcaggtcaccgccggcaagcagacccatgagctgaccaccgaccgcaacggcgtcctgcgcctgaacctgttggacagcccatttgccgagcaggacctaaaccgcgtcaccaccttgaagatcagcgtggaagatggccaggacgatgtgcattcggactcgaccctggcgatcagcaacaccctgcgcggcaagttgctcgaagcccacggtttgatctacgacgatctggaagacgatgaagtcagccagtgggtgcaccgggtcaagcgcttgtcggagctgggcctggaagaagaggccagtgagctggagcaaagcctgatcgaactgacgcgcaatgatcccgagttgcagcaagagtttctgcaggcgctgaccaaggatgcggggcggctagtcgcagatcccggcgcacgctgagcccctcaaattgttgccggtcaaatgtgtgagggggcaagccccctcccacatttgctcccgatttttaccaggaaaattcgagctgctcgttgccattgctcaggtccaacaaccgcacaccaatccccaacaagcgcaccggcttgcctccgcggttgaacgcctgcgtcagcagctgttgataactctctagatcccgccctgccccagcctgttccagtgtggtctgggtaaagtcatgaaacttcaccttcacgaacggcttgcccgccctgtaactgctatcgatgcgcgccatgcgcccggccagggtttccatcagttcgggaagtttggccaggcagcttgagaggtccggcaggtccacgtcataggtattttccacactgatcgattgtcggcgactgtcgttctgcaccacacggtcatcgatcccacgcgccaggctccacagccgctcgccaaaactgccgaattcgcgcaccagcgccagcttgttccactcgcgcagttgcaggcagtcttcgatgcccaggcgtgccagtttatcggccgtgaccttgcccacaccgtgcaacttgctgacccgcaactgtgagacaaagtcttcgacctggtccggggtaatcacaaacaggccgttgggtttcttccagtcgctggcgatcttggccaggaacttgttcggcgccacgcctgcggacacggtgatgtgcagttggttggagacacggcgacgaatgtcctgggcgatgcgcgtggcgctgccgccaaagtgcgggctgtcggacacatccaggtaagcctcgtccaacgatagcggttcgatcaggtcggtgtagtcgcgaaagatcgtctggatttccttcgaggcttccttgtaggcgtccatgcgtggcttgacgatggtcaggtccgggcacagcttcaaggcatgccgcgacgacatggccgagcgcacgccataggcgcgcgcctcgtagttgcaggtggcaatcacgccgcgccggtccgccgagccgcccaccgccagcggtttttgcgccaggctcgggtcatcgcgcatctcgatggcggcgtagaagcaatcacagtcgacgtggatgattttgcgctgcgtcatataaacggggtgtgtacctacgggtggccagtatcgcattcacacctgtatatagcaccagtagtttgaatcttccgctcaagcggtaggaaaattccaggatgaatttattttctcaatcggatttggccttccgatagagctgaaagcctcggccagactgggcccgcggggtatcaaggggcctttatggagagctaagcgattgaaccacaagcgcttttctttaattcacaggttgacagaccggcgttcctctgtagaatgccgacacacagacgcgggatggagcagtctggtagctcgtcgggctcataacccgaaggtcgtcggttcaaatccggctcccgcaaccaaacatcaaaaaaggctactcgaaagagtggccttttttgtgcgtgcctgttttgtcctgtacgaaaattgtaagacaaaaaaatctttgcccttcgcgcacttacggtgcatggccgacattcaacggctaattcacacttatttgacccatcggctcattaacggttgacacctcggcgctgaactgtagaatgccgcccacagacgcgggatggagcagtctggtagctcgtcgggctcataacccgaaggtcgtcggttcaaatccggctcccgcaaccaaacctcaaaaaaggctactcgaaagagtggccttttttgtatctggtgaaaaagttcttctgaaacaatggcatggcatctttcatgaaaccgcacacggtttgtagagtccatctcattgcaagctatgctcaatgctcaagcgctgccctctacgaccaatggccgcagtcgccgcccccggcgatacgcgttaatatttgtaattattttgtccatagggattggtaacttggctggatacctccatcctgtcgcgcacaatccacgaggtgattgatgcgcgccaactcgtctgaaccacaagacaccgtcacagcagaacaaccgatcacacccacccgcttgcgctggctggatctggtgagcaagtaccggcaacctatcgggctggccgtcaccttattgctgtttgccattgccctgatcgcctgccgccacctgctgctggagctggacctctacgccctccacgactcgatcctggaagtgcccaagccggccctgctcggtgcgtttgccgcagccattgccggttttgtcattctattaggctatgaattctccggcgcccgctatgccggcgtaaacctgcccgccaagaccctggcccttggcggctttaccgcattcgccatcggcaatgccattggcctgtcgatgctttccggcggatcggtacgctaccgtttatatgcacgccatggcatcggtgcatccgaagtcgcccatatgaccgtgttcgccagcctggcgctgggcactgccctaccgccactggctgcattggcaacactgagcaacctgcccgccgcatcgacctacctgcatttaccgcaagcggtgctgggcggtattgccggcgcggtgctgctgttgtcggcggtgttgtgcatcggcatttatcgccgtcgcctgccggagcaaccctacccggacaacctgttggtcaaagccggccgccgcaccttgcgcctgccgggccgtcgcctgaccttcctgcaactgatcattaccgcactggacgttgccgccgccgctaccgtcctttatatgctgttgcccgaggctccgcccttcggccccttcctgctcgtgtacctgctggcgctggccgccggtgtactcagccatgtaccgggcggtgtgggtgtattcgaagcgatcctgctggcagccttcgccgacaaactgggcgccgcgccactggccgccgccctgctgctgtaccgcatgatctacgtggtgctgcctctgctgatcgcctgcgtgttcctgctggtcaacgaagcgcagcgcctgttccagacccagcaaagcctgcgggtcgcctcggggctggcggcgccagtactggccgtcctggtttttctgtccggcgtggtcctgctgttctctggcgccacgcccgaaatcgactcgcgcctggaaaacatcggcttcctgattccccaccgcctgattgacgcctcgcactttggcgccagcctgatcggcgtgttgtgcctgctgctggcccaaggcctgcgtcgacgcctgtcggccgcctggatgctgaccatggtgctcttgctggcgggcgccctgctctcgctgctcaaaggcttcgactgggaagaagccagcctgatgaccatgaccgcgatcctgctggcgatcttccgacgctcgttctatcgcgccagccgccttaccgagctgccgttctcgccgctgtacctggtggccagtgtctgcgtgctcggggcgtcgatctggctgttgctgttcgcctatcaggacgtaccgtacagccatcagctgtggtggcagttcaccctggacgccaacgccccccgtggcctgcgctcgctgctcggcgccgccgtgttgctggtgatcgtgtccctgacctggctgctgcgtaccgcgcgcccggtgatccatttgccgacacccgatgaactggagcgcgccagcaaaatcctgatggcctcttcacagcccgacggcggcctggcgctcaccggcgacaaggcgctgctgttccaccccaacgacgaagccttcctgatgtacgcccgtcgcggtcgcagcctggtggccttgtacgacccaatcgggccaacccaaccccgcgccgagatgatctggcagttccgtgacctgtgcgacatccaccacgcccgcccggtgttctaccaggtgcgtgcggagaacctgccgtactacatggacatcggcctcaccgcgatcaagctgggcgaagaagcccgcgtcgacctgaaacgctttgacctggaagccaagggcaaagagatgaaggacctgcgctacacctggaaccgtggctcgcgggacggcctgtccctggagatctgcgaaccgggcaccgcgccgatggacgagctcaaggtgatctccgatgcctggctgaccggcaagaacgtgcgggaaaagggcttttccctgggacgcttcagcgacgactacctcaagcacttccgcatagcgatcattcgcttcgaagggcgcccggtggccttcgccaacctgctcgagacctacaaccatgacctggccagtctcgacctgatgcgcgcccacccggacgcgcccaagctgaccatggaattcatgatggtcggcctgattcaacattataagagtcacggctacgcccgcttcagcctcggcatggtgccgttgtcgggcctgcaaccacgacgcggcgcaccgctgacccaacgcctgggctcgatggtgttccgccgtggcgagcaactgtataacttccaaggtttgcgccgcttcaaagacaagttccagcctgactgggaaccccgttacatggccgtgcccgcaggacttgatccgctggtggcactggccgataccgccgccctgatcgcgggcggcttgactggattggtgaaacgctgatgattcgacgctcctggcggtatgtattggcctttgtagtgctgctcgccctgttcctgggtggcggctattggtactggaaccgccctgccccacaaccggtgctggagcaactgccccaggccgacggttcggtcatgacccgcgtgacccccaacggcacgccaaaagcccgcgtggccgtggccgtgatggccgatgaaaccctgaccgacagtcaactgattgccttgagccaaggcggcaaggcgcagattgtccaggtgatcctgcccaaggatgactgcaaactgcaggaacaagcgctgcaaagcgccctgggccagctcaagggcccggcgacgctggttagtggcatcggccccggtgcaagcctggcctggcgctggctggcggcacagaccgacgacaaggccaacgccatctccgtcggcttcgccatgacccagccaggctgcaccgacccgctgccgaaaacctccgcccacggcaactggctggtggcctggaacgacaaccctgaggatgacgccgccagtttcgtccgtgacacaccgcgtgccaccaccagcatcagtgactacgacattcattacccgcaagtgctgaacaacgagttgcgcaagcaactggtgggctcggacaacggcggcctggcgattccggtggttgaagtaccggccggccaggccaaggacactgtcaccctgttcctgtccggcgacggcggctggcgcgacctcgaccgtgatgtggctggcgagatggccaagatcggctacccggtggtgggcatcgacacgctgcgctactactggcagcacaaaaccccggaacaaagcgccaaggaccttaccgagctgatgcagcactaccgtcagaaatggggcaccaagcgcttcgtactgaccggctattcgttcggtgccgatgtattgccagccatctacaatcgcctgccggagaacgagcagcagcgtgtggacgcaatcatcctgctggcgtttgcgcgtacgggcagcttcgagattgaagtggaaggttggctgggcaatgccggcaaagaagccgccacgggcccggaaatggccaagctgccggctgacaaagtggtgtgcatctacggcgccgaagaagtcgacgagagtggctgcacggacaagacggccgtaggtgaagccgtcaagctgccaggtgggcatcacttcgatgagaactacccggcgctggccaagcggttggtggatatcatcgtgaaacaccagaccaaggataaagccgagtaactccagctattacatggcttaaaatgtgggagggggcttgcccccgatggcggtgggtcagctacagataagctgactgaagtgccgctatcgggggcaagccccctcccacatttatatttgcaatgttgtttagattcagcgcggttcgatatgcgcgatcatcaattgcacggtttcattcccgcgaaactcgttcacatccagcttgtaggccagctccacccagcgcaccgtcgggttcggccagatctcccggtccaccccaaacgcaatgccatcgagcttcaccgagccgcattcgctcttgagcacgaccttcaagtgccgctcgcccaccacgcgctgctccaccaactgaaacacgccgtggaacaacggctccggaaagtgctgcccccatggcccggcatgtcgcaacgcgcgggccagttccaagtgaaactcttccaccgccagtgtgccgtctgacagcagacgaccggtcaggtcttcttcgcgcagttgccgacgcacttcggcatcgaaggcttcggcaaacagcggaaagttttcctcgggtaatgtcagcccggccgccatcgcgtgaccgccgtatttgctgatcaggttcggatgctggctggcgaccaccgccagggcatcacggatatgaaaaccctgcacagagcgcccagagcccttgagcaaaccgtcgccagcgtcggcgaaggcaatggtcgggcggaagtagcgctctttcatgcgcgacgccagaatcccgatcacaccttggtgccattccgggtcgaacaggcacaaaccgtagggcatcgactccaccggcaagtccttgagctgggccagggcctcgcgctgcatgccttgctcgatggatttgcggtcctggttcatgccgtccagttgcgcggccatttcacgggcagcggccacgtcggtggtgagcaggcattcgatgcccaggctcatgtcatccaggcgtccggcggcgttcaggcgcggcccgaggataaagcccaggtcggtggaggtgatacgtgcggcgtcgcgcttggccacttctaggatcgccttgatccccggccgtgcacgaccggcgcggatacgttccagcccctgatgcaccaggatgcggttgttggcgtccaggggcactacgtcagcgacgctgcccagggcgaccaggtcgagcaactcgccgatgtttggctgtggcttgttctcgtaccagcccaaactgcgcaggcgcgcacgcaaggccatcagcacgtagaagatcacgcccacgccagccagcgccttgctcgggaattcacagcccggctggttcgggttgacgatggcatccgccgccggcaactcgtcgccgggcaagtggtggtcggtcaccagcacctgcaaccccgccgctttcgccgctgccacgccttcgacgctggagatgccattgtccacggtaatgagcaactgcggctcgcgctgcaaggcaacggcgacgatttccggggtcaggccgtagccgtattcgaaacggttgggcaccaggtaatcgacatgggccgcgccgagcaagcgcaggcccaaggtgcccacggtgctggcggtggcgccatcggcgtcgaagtcaccgacgatgaggatgcgttggcgttgctccaatgctgtcaccagcaggtcgaccgccgcgtcgatgcccttgagctgctggtagggaatcaaccgcgccaggcttttatccagttcggcctcggacagtaccccgcgcgcggcgtaaagacgggtcaacagcggcggcaattcaccaagaaacggcaggacggcgggcaacgggcggggatcgatacgcatggggtgacggatacttctcttctgatacggaaataaaacaggtgaccggcggcgatccaatcaaccgcgttcgccaaccagccactgcaactgcacttcatgctggccgcggtcgtcggtgacgaagatcgtgccttcgctgatcatcacatcccacttgataacacgcggcatgtccttggccagggtctcaaggacttcctgcggcacggcggcgatgtgtacgtttttcaggttgttcgccaccggcaccaccttgccttcccacacacgcaggctgccgtaggccagcaggctggtgcgttcagtgcggcgcgagcaccaggtgaggcggtccgcatcgggctggccgacttcgatccagtgcaacacccggtcatccaggcttttttcccacaaggctggctcgtctacatctgataggccacgtccgaacgacaactgctcgttgtaccagagggcgtaggccagcagacgcacggtcatgcgctcttcggtttccgacgggtggcgggcgatggtctgtttgacgctctcgtacaccgagcgatcgaggtcggtgaggttgagttcgaatttgtaggtcgtggacggctgggccatgaacgggcttctagagacagggaaaggcggccagtctaaccgatgacgaggccaatcaacgaatccagcgctgccctgggctgctcgcctatgttaaaaggcatcacaccaccgccctgcgcagacaaggatcctcatgtcgttcaatgccaaaccacttgccggcctgaaagtcatcgaactcggcaccctgatcgccggcccgttcgcctcgcgtatctgcgcggagttcggcgccgaggtgatcaaggtcgaatcaccggacggcggcgacccgctgcgaaaatggcgcaagttgtacgagggcacttcgctgtggtggttcgtgcaggcgcgcaacaagcagtcgctgacgctgaacctcaagcacccggacggcctggccatcctcaaacaattgttggcggacgccgacatcttgatcgagaacttccgccccggcgtgctggaaaagctcggcctgagttgggagaccctgcacgcgctgaaccccaagttggtgatggtgcgtctctccggctttggccagaccgggccgatgaaagaccagccagggttcggtgcggtgggtgaatccatgggcggcctgcgctatatcaccggtttcgaagatcgcccgccggtgcgtaccggcatttccatcggcgactcgattgccgcgttgtgggcggtgatcggcgcactgatggcgctgcgtcatcgcgaggtcaacggtggcctgggccaggtggtggatgtggctctgtacgaagccatcttcgccatgatggaaagcatgatcccggagttcgacgtgtttggctttattcgcgagcgcaccggcaacatcatgcccggcatcacgccctcctccatccacaccagcgccgacggcaagcatgtgcagatcggcgccaatggcgatgcgatcttcaagcgcttcatgtcggccattggtcgtgaggacttggccatcgatccggtactggccagcaatgacgggcgcgacagccgccgtgatgaactgtacggcgtgattgatcgctgggtgaactcactgtcgctggatcaggtggtagaaattctgaataaagccgaagtgcccgccagccgcatctacagcgccgaggacatgctcggcgacccgcaattcctcgccagggaaatgttcctcaaggcccagcttcccgacggcaaggaattcaagatgccgggcatcgtgcccaagctgtcggacacgccgggcagttgcgaatgggtggggccgcaactgggtgaacataacagcgtagtgctcggcgggctgggttacgacgctactgccattgtgcgtctgcgcgaggaaggcgcgatctgatggcccgtcgggttactcagttgtgcctcgccgtcatgatggcgagcgcctggcctctgccggccaatgccgaggacacgctgatctggcttttgcgtgatttaccgccactgaccattttcgaaggcccgcgcaaaggccagggtgcgctggaccaactgctgccgaaactgatcgagcatctgccggaataccggcaccaggtactgcacgtcaatcgcgcacggggtacacaaatgcagcgcgagcccacattcacctgcgacccttcattgctgtggaccgccgagcgggccaggtacgtggtgttttccaggcaggcctttgtggtcgccagcaatgggatcacgatccggcgcagccagcagcaagccatggccgactatatttcggaaggccagtttgacctacaggccttgctcgacgcgcataaggcacgggtgggggccactgcggagcgcagctacggtcctgtcatcgatgcacagctcaagcaggccgacacgcactcactcgcgctgcattacggtaacgatgcactgggcagcctgttacaaatgcagcgcctggggcgcttggaggccgtgctgggttactggccggagatccgctaccacgcgatgcagcaaggcatcgcctcggatgacctgagcttctatccgatcaaaggctcggcgccgtatcagcgtacgcacatcggctgctcggatacgccccaggggcgccaggccatcaaacgaatcgaccagatactgcgcgagatcccgctggaacaagtgcagcagtcgtatacctcatggctggacccggtcatgcgcacccattacctgcgggataacccgagttttttccaggactcgccagagccgtgacaaatcgcaggcaaaaagaaaccccaaagcgtggggagacactttggggttaaacgtggcctacaaagaccagtacagcaaggcacaaacaccggagcacaatgtttgctcttgctgttacaaaatctgaccggccacgctgtaggaagtttccacagttaaacaattcttcatgcggcggtggcgttgcgagtctgggctgcgttgcgcaaggctgctatgaccgagggttccagacgtccttcggcaattttgatgtcacgcagcaggcaatccactacatccaccagcacgcgcttgtccatcaattgggcgcggtcgacgtcacgctcgaccacgatggcgccagcaggattcttaacggttaccaggcactcgtcctgcacaccagaggtggtcagcgtaacctgataagggctcagtgcttcttcgagcaataggctgatactttccatctcgatcaccactcaatagttcgggaacaatcgtttcaacgggagctgcatctatcctaagtgactgtttgtgacgtaggaaagttcgctttatcgtctttatggggccgtcagggggtgacggattccagcatgcgcttgcaacatgacaacgaaaaaacggccgcacataagtgcttacgcaatgggcggcttttttgggggttccgggcgttgaggcccaaggtgaatcctatactcggtgggcgctgatcactttgccttgcaggcaggagcgcatgtcaaaaggcccttattgcgaaggataaatacgatgctggaacacgataaagagcaagctgcgctagagaagattcacgccgacatatcacgcatttatgcggagcaacgcaaactcactgccgagacacacaagataacccgtgagaatttctggtatccattgggtgtcgtcatggccatgtttacggcgttcagcactgtcttggctatcgtacagaaactactcacgtagccgcgtataccaagcggggcctgccagaaacgaaaaacgccgctgccccaggaagggaaagcggcgtttttgtctacgcggtgtgccttacaacggcttaccccggttgccatgctggctcacaaacgcctgtacggccttcaggtcattggccaacaccgtgcaacgctcttcacgctcgaacaggtcagccaggtgcaccggcaactccagcgccttgccaacaccggccttctccaccgcttccgggaatttcaccggatgggcggtgcccaggatgaccatcgggatatccaggctgcgacggcagtcgcgggcggccttcacgccgatggcggtgtgcgggtcgagcagctcgccggtctgggcatagacttcagcgatggtttcgcaggtctgcgcgtcgtccacggccagggagtcgaacagcttgcgggtttcggtccagcgctcttcatccacgctgaaaccgccgccgctcttgaaggtgtccatcaagccggcaatcgccgcaccgttgcgaccgtgcatgtcgaacagcaggcgttcgaagttcgacgagaccatgatgtccatggacggcgacagggtcgcgtgcagggtctccttgacgtactggttgccgctcatgaagcggtgcaggatgtcgttgcggttggtggcgacgatcaattggttgatcggcaggcccatgttgcgcgccaggtaaccggcgaagatatcgccgaagttaccggtcggcaccgagaacgacaccgaacgcgccgggccgcccaactgcagcgaggcatgaaagtagtagacgatctgggccatgatccgcgcccagttgatcgaattcaccgccaccaggcgtgtgcccttcaggaagctctggtcagcgaagctgttcttgaccatttcctggcagtcatcgaaattgccttcgatggcgatgttatggatgttctcgccgaagatggtagtcatctggcggcgctgcacttccgacacacgcttgtgcgggtgcaggatgaagatgtcgacgttttcgcagtgcttgcaaccttcgatggccgccgaaccggtatcaccggaggtggcaccgatgatcaccacgcgctcgccgcgcttctgcagcacgtagtccagcagacgccccagcaactgcagggcgaagtccttgaaggccagggtcgggccgtggaacagctccagcacccactcgttaccattcagttggcgcagcggtgcgatggcgttgtgggaaaacacaccgtaggtttcttccagaatctttttaaagtccgcatccggaatgctgccggtgacgaacgggcgcatcacccggaaggccagttcgtggtacggcaggccggcccaggaagcgatctcttcctgggtgaagcgtggcaggttttccggcacgtacaggccgccgtccgtggcaaggcctgccagcaggacgtcttcgaaattcagggccggtgcctggccgcgggtactgatataacgcatgactggctcctctagagcattcttgaacaagggccgccgaacttgcggggctcttgccgcaaaaccattagttcaggtgttcgacgcgaatccgtaccaccgggccgaccacgccttgcagggcttccagggcagcgatggcatcgttgatgtgctgctcgagcacgcggtgggtcagcaggatcatcggcacctggccgttttgctcctcgacttccttctgcatgatcgactcgatgttgataccgcgctccgacaggatgctcgccacttgggccaacacgcccgggtggtcctgggcctggatgcgcaagtaataggcgctttcgcaggcttcgatcggcaggatcgggtgagccgacagcgagtccggctggaacgccaagtgcggcacacggttttccgggtcactggtcatcgcacgcaccacgtccaccaggtcggcgatcaccgacgaagcggttggctccatgccggcacccgcgccgtagaacaacgtggaaccggcggcgtcaccgttgaccatcaccgcgttcatcacgccattgacgttggcgatcaggcggtcggccgggatcagcgtcgggtgcactcgcagttcgataccggccggcgtgctgcgcgccacgcccagatgcttgatgcggtagcccagggcttcggcgtagttcacatcggccgtggtcagcttggtgatgccttctgtgtaggctttgtcgaactgcagcgggataccaaaggcgatggacgccaggatggtcagcttgtgcgcggcgtcgataccttccacgtcgaaggtcgggtcggcttcggcgtaacccagggcctgggcctcggcgagaacgtcttcgaaggtgcggcccttctcgcgcatttcggtgaggatgaagttgccggtaccgttgatgatgccggccacccagttgatgcggttggcggacaggccttcacggatcgccttgatcacagggatgccaccggccactgcggcttcgaatgccacgatcacgcccttctcacgcgccttggcgaagatctcgttgccgtgcacggcgatcagcgccttgttggcagtgaccacgtgcttgccgttctcgatggccttgagcaccagttcgcgggcaacggtgtagccacccaccagttcgatcacgatatcgatttcagggttggtggccacggcgaagacatcgttggtaatcgcaataccggtcgtttcgaactgaggctttggcgaacgcgtggcaatttgcgccacttcaatcccacgccctgcacggcgggaaatttcttcagcgttacgctgaagtacgttgaaggtgccgccaccgacggtccctaacccacagatgcctactttgaccggtttcactgaagaactccccatgaaacggccgacgcgaggtcggccgtggaaaacagccgcacgactgcggctttcaattaacggcctgtcgacttatccacaggccatgatcgtcaaaggttcgacgatgctggtttatttggcactcagcgccagtttcgcaacttgtggtgccggctggtagcccggaatcacctggccgtcagccaaaacgatggccggtgtaccgttgacgccgatggactggcccaacgcgaactgcttggagaccgggttggcgcatttggcggccttgatttccttgccgtcgaccatcttgtccatggccgcttttttgtcggccgagcaccatacggcttgcagctgctcgtcacccggcgaacccaggccctggcgcgggaacgccacgtagcgcacttccacacccagtttgttcagcgcaggcacttcggcgtgcagcttgtggcagtacgggcaggtggtgtcggtaaacacggtgatgtgggtcttggtctcgccgatggctgggtaaaccacggtttcagccaccggaataccattgatcagcttggaaacacccaggcgttcggctttctcggtcaggttgaccggcttgccgtccttcaactggaacaggtagccctggacgatgtactggccatcggcactggcatacagcacgcggctacccttgagcttgacttcgtacaggccggccatcgggctggcgctgatgctctcgatcggggtgtcgagctgcaggttggccaggcttttgcggatggtctgctcggcggcgtcatcggcaaaggcaaaggtggaaaccaacgcaatggctgcggcggcaataatctgggtcaagcgcatgggaactcctgaaggcagatgcagggacgggcagtaacactgcttggaaacacaggtctgggtcgtcccctttgctaaccggcaaagcctaccacagttgggccgcagggcagcccgtggccggataaattggacgttttcagcctcgcgggtggtgcttggcgtgcatatcctgcaaacgcgcgcgggccacgtgggtgtagatctgggtggtggacaaatcgctgtggccgagcagcatctgcaccacacgcaaatccgcaccgtggttgagcaaatgcgtggcgaatgcatggcgcagtgtgtggggcgacagcgccttgccgatcccggcgaccttggcctggtgcttgatgcggtgccagaaggtctggcgagtcatctgctcgccacgcaaactggggaacagcacatcactgggccgtccaccgagcagttcgctgcgggcatcgcgcatatagcgctcgacccacacaatcgcttcctcgcccatcggcaccagccgctccttgctgcctttgcccatcacccgcaacacgccctggcgcagattgacttgctccaaggtcagactgatcagctcggtcacccgcaggccacaggcgtagagcacttcgagcatggcgcggtcgcgctgaccgatggcctcactgaggtcgggggcggcgagcaaggcctccacgtcggcttccgacagggatttgggcaacggtctgccaagttgtggcatatcgacttgcagggtggggtcgagggcgatcagcttttcccgcagcagatagcgataaaaaccacgcacgccggagaggaatctcgcggtggaacgtggtttgtagttctgttccaggcgccaggccaggtggtcgaggatcagctcacggcccgcgttgatcagtgcgaggtttttctcctgcaaccagccgttgaacagcgccagatcgctgcggtaagcctggcgcgtgttgtccgacaggcctttttccagccagagggcgtcgagaaaacggtcgatcagggggtggtcaatggcaggcatagaggctcgaataaaaaagtgggagaggcaggtagcatcctatctcggacctcaaatcgcaggcacaaaaaagcagcccgtaggctgcttttttctgcatcgggaagctggacttaagccagtttttccttgatgcgagctgctttaccggacaggtcacgcaggtagtacagcttggctttacgtacgtcaccgcgacgcttgacggccatgctgtcgatttgcgggctgtaggtctggaaagtacgctctacgccaacaccgttggagattttacgaacagtgaaagcactgttcacaccacggttacgcttggcgattaccacgccttcgaacgcttgcagacgcgaacggtcgccttccttcactttcacctgaacgacaatggtgtcgcccggggcaaaggtagggatctctttggtcatctgctctgcttcgagtgcaaggatgattttgttagtcatgctgtgctcctaaggtaagtcaatggacctaccatcgatacgttgttaactatcgtcccgcgcgaggatgtattcctcgagcagcttcttctcttctccagaaagcgagcggctttccagaagatcggcgcgtcgttcataggtccgaccaagggactgctgtaaacgccaacgccggatgtgtgcgtgattgccacttagcaatacgtcgggaacacgctgatccgcatacacctccggtcgggtgtagtgcgggcaatccagcaaaccatccgtgaaggaatcttcctccgcggagtccgcatgccctaaagctccaggcagcagtcgtgtaaccgcatctatcaggaccatcgctggcagctcgccgccagacaggacatagtccccaatcgaccactcttcatcgacatgagcttcaataaaacgctcgtcaatgccttcatagcgaccggcaatcaggatcagtgcttcctcattcgccagttcgcggaccccagcctgtttcagctgacggccttgaggggacaggtaaatcaccttcgccttctccccggcagcgaccttggcctgaaccaacgcgtcttccaggggcttgatcttcatcaccatgcccgggccaccgccaaatgggcgatcgtccacagtgtgatgtcgatccgtcgtgtagtctcgcggattccaacaggtaagctgcaacagcccctgtttcaccgcccgactggtgatgccgtactcgctgatggcggaaaacatctcgggaaacaaactgatcacttcaatgcgcaaattagccacgcttagaagtccgcgtcccattccaccttcatctcgcccgctgccaggtcgacggccaacacgcattgctcggtatagggcaacaggcgttcgcgatcatccaggctgccagcgcaaggcttgaccaccattacatcattggcgccggtttccagaagatgatcgattttcccgaacagttgcccgagttgatcaataaccttcagaccttccagctggtaccagtagtactcgccgtcggtcaattcagggaacaggttgcgcggcacgcagatctcataaccggccagaagacgagcttcttcacgatcatcaagacccttgagctttgcgaccaggaacttgtcgctcccgcgtccactgaccagctcgacctgtttcacactaccctcgcgcttgagcgtccaggttttgtactgcaacaggttttcagtcggatcagtaaaggaatacaccttcacttcgccgcgaacgccatgaaccgagtaaatcttgccgataacgatcaaatcatcagcaacagctggcgtcgcgttcatattgctcaggctgcggccttagccgagtccttcaacagttttgcaacgcgctcggatggctgtgcacccacgctcagccagtaggctacgcgctcttggttcacggacagacgaacttcttgaccacgagcaacagggttgaagaaaccaacctgttccttgtgcgaaccgtcgcgcgggttgcggctgtcggttacggtcaagtggtaaaacgggcgctttttggagccgccaagggcaagacggattgttagcatgtgaacatcgttcctgtagtcggtgctgcaaatctaaatgcacagcgggcataggtgcccgaaaggccgcatattctaaggaatatccggacttttgcaaatgtctttttctggcgcctatcagcgtgccattcagatctgctatagagccgtcggttaaaacggcgagtcagcgcccgccaacggcgggtttgctggagatcccacatccctgtgggtcggagcaggagctgggctcccgctcgaattctttacatcttgggcatgccaccgccgggcaacataccgcccatgccgcgcatcatcttggccataccgcccttggcggagaatttcttcatcatcttctgcatctgcttgtgttgcttgatcaagcgaccgatgtcctgcacctgggtgccggaacccatggcgatccgacgcttgcgcgaaccgctgatcagctcagggtcgcggcgctcggccggggtcatggagttgatgatggcttccatctgcttgaactgcttctctgccgcgccctgggcattgcccatctgcgccaggttcacaccgccgatgttcggcagcttgtccatcaggccgccgaggccgcccatgttcttcatctgttgcagctggtcgcggaagtcttcgaggtcgaagcccttgcccttcttcagctttttagcaagcttgtcggccttgtctttgtcgagggtagcttcggcctgctcgatcaggctgagcacgtcgcccatgccgaggatgcgcgaggcgatacgctcgggatggaacggttcgagcgcttcgctcttctcgcccataccgatgaacttgatcggcttgccggtgatggcacgtaccgacagcgcggcaccgccacgggcatcgccgtcgaccttggtcaggatcacgccggtcagcggcagtgcgtcgccgaaggccttggcggtgttggccgcgtcctggccggtcatggcgtcgaccacgaacagcgtctcgaccgggttgatcgcggcatgcagcgccttgatctcgcccatcatctcttcgtcgatgtgcaggcgaccggcggtatcgacgatgaccacgtcgatgaacttgagcttggcttctttaatggcagcgttggcgatgtcgactggcttctggctcaggtcggacgggaagaaggtcacgcccacttcgcccgcgagcatttccagctgcttgatagcggccggacggtacacgtcggccgacaccaccatcacggacttcttcttgcgctctttaaggaagcgcgccagcttgccggcggtggtggtcttacccgcaccttgcagacccgccatcaagacgacagccggcggcaccgcactgaggttcaagtcttcgttggccgcgcccatcaggctttcgagttcggcctggacaatcttcacgaacgcctggcccggggtcaggctgcgggacacttcggtgcccaccgcgcgctctttgaccgagttgacgaagtccttcaccaccggcaaggccacgtcggcttccagcaacgccatgcgcacttcacgcagggtgtctttaatattgtcctcggtcagcttggccttgccggtaacgtggcgcagcgtctgcgagagacggtcagtcagattttcaaacatgcgcgatcctttcaggccctattcatagaccgaggtaatggcggcccaggctgtggtaaatcgctattaaaaacagcgctcggcgagcctgcggcgtgggcaggtcgcggattatagcgaagactgcgcccatgcacacccgctgtctggcccgggagtctttcgtgttgcgcgggggtatgccaaactcagcgcctttcgggcttgcctaacaggatttatgctccctttgtcacccagtttgctacccagcctcgccgccgccatcttgtacgccgctgcgaccgtctatcagggcactcgtctggcccagggcaccaaggcggacaaacgcctgttggtaggccttggtgtcctcgccttgctcgcccatgcggccagcctgttcacgcacttgatgacgccggtcggcctggccctggactttttcagcgccgccagcctgatcgcggcggccgtcatcgcgctgaccctgatggcctgttaccggatcccggtcgaaaacctgctggtgctgctcttcccgctgggcatgctgacggtgctgctggcgcaattcgcgcctaccggtacggtgccggtgatcgatgaagagccgggcatcctcgcgcacatcctgctgtcgatcctggcctatggcatgttcaccatcgcggtgttccaggccctgctcctgctgctgcaggaccaccagctcaagcacaagcatccgtccgggctgatcaagaacttcccgccactgcaaaccatggaaagcctgctgttcggtttcctgtgggccggctggaccttgctctcgctgtcgctgatctccggctggctgttcttcgaaaacctgttcgcccagcacctggtgcacaagaccctgctggcctgcctggcctggatcgtgttcagcgtcctgctgtggggccgcaaccgcctcggctggcgcgggcacaaggcgatccgctggaccctggccgggttctgcctgctgatgctggcctatttcggcagcaagctggttcgcgaatacatcctgcatatctgacgggcggcgatcatggacaacttgcccctggagccgatgctcgcggtaatcgccctgctggtgttgtgggccgcgctgttcaccgccatcgaggccgcccagcaacatttgctggccctgcgccccggtacacgccagggcgacaaggcggccacccgcctgagctttccgcgtaacagcctgatcctgtgcaacagcctgtgtcgcgccgccgtggtcatcctgtgcacgctgctggccatatacgcctgggcgcagaacgggccgtggctcggctggctgatctcctgcgcgatcctgctgatactggccgactacctgccccgcgccctggccacccgctatccgcaagcggtactgggcttcggcaatacgctgctgggcgtgccactgaaaatcgtctaccccctggcctggctgctcaatggtattagtctgttgctgcttcgcccgttcgcgcgcaagaccggcgtggtgaagaagagcgacgaaccgctgcctgaccatgatgacgaacccgagcccgagatcgccgaaggccgtacccccggcatgccgggcatccatgctctggacaacatcaccgtcaacgacatcctggtgccccgcagcgaagtggacggcatcaacctggatgactcgatcgaggagatcatcgagcagctacgcacctcccagcgcacgcgcctgccggtgttccacagtgatatcaaccaggtcgaagccgtgctcaacacgcggcagatccagcacctgttgcccgacgcgagcctgaccaaagaggcgttgctcgcagcctgccacgagccttacttcgtcccggaaagcactccgctgcaactgcaactgctgaatttccacaaacagcagcgccgcctgggcatggtggtggatgaatacggcgaagtactcggcatcgtgaccctggaagatatcctcgaagaaatcgtcggtgaattcgaaagcgaacagagtgcggacaacccgcatatcgaagcgcaaccggatggccgctacatcatcgacggcgccgcctcgatccgcgaattgaacaagagcctgaactggcacctgcccagcgacggccccaagacgctcaacggcctggtcaccgaagcgctggagaccattccggattgcgcggtgtgcctgaaaataggccgctaccgcctggaaatcctcgagaccgaggacaaccgggtgagcaaggtgctgatctggcataccagccggatgccggtcgccgcttaattcgtaatcaaataatgtgggagggggcttgcccccgatggccgagtgtcagtcaccgcatcaagtggctatacacagctatcgggggcaagccccctcccacattttgacttgttgtatgttcaaaccccttcctataatcgggacggcttaccagagccctgcccgaccgcgtgctacccgcactgaacgcgtccaggcaccgttaaaccgcgtctgaccggtgttcgctcccatcccgagccgccccgcgcgctaccctgatccatgggagttcgaccaataataatccgcgtccaaacgcgcaatgaccgtcagggataccaccatgagcaccacctacaacgaggccgcgcccgccgctgccccgaccaactcgaccgcacgtgtcgccacggcgagcatcgtcggcaccgccatcgagttctacgatttctatatctacgccacggccgctgcgctggtgatcggcccggtgttcttcccgcagacttccggcaccgcgcagatgctggcgtcgttcctgaccttcggtatcgccttcatcgcccgcccactggggtcggcgctgttcggtcactttggcgaccgtatcgggcgcaaatcgaccctggtggcctcgctgctgctgatgggcgtgtgcaccacgctgatcggtttgttgcccggttatgacagcatcggggcgtgggcgccgatcctgttgtgcgtactgcgtttcggccagggcctgggcctgggcggtgaatggggcggcgcagcgctgctggcgaccgagaacgcgcccaagggcaaacgcgcctggttcggcatgttcccgcagctcggcccttcgatcgggttcctggcagccaacggcttgttcctgatcctggccatgagcctcagcgatgagcaattccgcagctggggctggcgcattccgttcatcctcagcgcggcgctggtgatggtgggcctgtacgcacgattgaagctgcacgagacgccggtgttcgccaacgccgtcgccaagcaagcgccggtcaaagtgccgttggtggaactgttcagccagcattggctgccggtgttgctgggcgctgcgtcaatggtggtgtgctatgcgttgttttacatcactactgcgttttccctgagttatggcgtttcaaccctgggctacagccgcgaaaccttcctcggcctgctgtgctttgcggtgctgttcatggggctggcgacgccattggcagcgttggccagtgatcgttacggacgcaaaccggtgctgatcgtcggcgcgatcctggcgattctgtcgggctttaccatggagccattgctcacccacggttcgacctgggcggtggcgctgttcctggcgctggagctgttcctgatgggcgtaacgttcgccccgatgggcgcgctgttgccggaactgttcccgacacgcgtgcgttataccggcgcttcggcggcgtataacctggggggaattgtgggggcatccgccgcaccgttcttcgcgaccaaactggtggcgatgggtgggctgagttatgtcggtgggtatgtgtcggcggcggcgttgctcagcttgattgctgtgctgtgcctgaaagagacgcgggataatgatttgaatcgcgtgggctgatagaccgctatcgggggcaagccccctcccacatttgaatgtattcacaaatctaactctgtgaactggatcaagtgtgggaggggggcttgcccccgatgcttttagagctctaccaccacagcctgggaagcacgggtcgccttggcccgggccgcttcaatcgactcatcccgcgccaacgccacgcccatgcggcgctggccattcacctcgggcttgccgaacaggcgcagcgcagtatcaggttcgctcaacgcggcgcccaggttggcgaacgccgtctgggtcgactgcccttccaccaggatcaccgccgaggccgaagggccgaactgacggatcaacgggatcggcaggcccaggatcgcacgagcatgcagtgcgaactgcgacaggtcctgggaaatcagggtcaccaaaccggtgtcatgcgggcgtggcgacacttcgctgaaccacacctgatcacccttgatgaacaactccacgccaaacaggccgcggccacccagggcctcggtaaccgccttggcaacgcgctcggattcggccagggcaatcgggctcatggcctgtggctgccaggattcctggtagtcgcccttctcctgacggtggccgactggcgcgcagaaggtggtgccgccgatgtggcgcacggtcagcagggtgatttcgtagtcgaagtcgataaagccttcgatgatcacacggcctttacctgcacggccgccttcctgggcgtagtcccaggctttctgcacgtcatcgacgctgcgcagcaggctctggcccttgcccgacgaactcatcaccggcttgaccacgcacgggaagcccaggtcctgcacagccttgctgtagtcttcgaaggtatcggcgaagtggtacggcgaggtcggcaggtccagctcttcggcggccaggcggcggatgccttcgcggttcatggtcagcgaggtggcgcgcgcggtcgggattacggtgaagccttcggcttccaattccaccagggtggcggtggcgatggcttcgatttccggcacgataaagtgcggtttttccgcctcaatcaccgcacgcagcgcggcgccgtcgagcatgttgatcacgtggctacggtgcgcaacctgcatggccggcgcgttggcgtagcgatccacggcaatcacttcaacgcccaggcgctgcagttcgattaccacttccttgcccagctcaccgcagccacacagcaaaacgcgggtcgcggttggcgacaatggagttccgattcgggtcatctcaggtcctcaggggagcggatcattgggagaaaggccggcattttacatgaactgcaggaattggcctcagttggcgacggcccgcttgcggatacgccaggccatgatcagccacaccaccgtgaccccagcgaacttcgacaccagcgcagttcccgccaccgccggggtaagcgcgccgatcaggccgaagaagataaaggtgtcgaggggaatgctcagcgccgaactgatccacaggcggtcgtgcagcggacgcttggtgatgctgaacaccagccagtcgatacactcggacactgcgaaggccgtggcgctggcgagggcgatggccgggtcggacgtgacgtacgacagcaccagcgcggccagcatggcgatgattgcgccatggccgaagcgggtttgcaccatgtcgcgcaggataaagaccaggccaccccaggcggaccagatgacatccaggtgcggggcggtggagaaggcgaagttgatcagcacgacgctgctgatgtaggcgatcaggaagagcatgggagtggacctgtgaacaaggggcacagggtacttcacattttgaaatatgtcgtctgggtggaccctatcgggggcaagccccctcccacagttgaccgaggtgtcatggccggcgccgaacaatgtgggagggggcttgcccccgatagcggcggttcagacaccggatttgccaggcatcatccacaccaacccactcgccagcgcccgctcatgacataaccccagcaccacccggcgctcggcgttatccatgcggctccaacgcgtaatctcttccaccgtacgctggcagcccgtgcagatatcgtcatcgtccagcgcgcaaatactcacgcaaggcgacgcaacaggacgttcaatcgggttcattcttcctgctcgaccaggtcccgcgcataacgctgcgagttatgcacatagtgcgcggcgctggcttcgagcatgcgtttctgcgcgtcggtcagttcacgcaccaccttgcccggcgagcccattaccagcgaaccatcgggaatttccttgccttcaccgatcagcgaattggcgccgatgatgcagtgcttgccgatcttggcgccgttgaggatcaccgcattgatgccgatcaggctgtaatcgtccaccgtgcaaccgtgcaacatggcgttatggccgatggtcacgccggtgcccagcgtcagcgggtagcccatgtcggtgtgcatcacgctgccgtcctgcacgttactgttcttgccgatcaggatcagttcgttgtcgccacgcaacaccgcgttgaaccacacgttggcgccctcctccagcttgaccttgcccaccagggtggcattcggcgctacccagctgtgtggatgagtctcgacgcgggcgtcgcccaggcggtatttcatggtttttcctcacggcgttgccattcaaacgatggcttagatattgatgaaactcttgggcggttgatgcaggctgatcttggcgtcgtcatagagcagattgatcagctcgacgatcatgatcgccgtcagcccccagatcttgtattcgccaaaccgatagctgggcacgtaccaactgcggccctggtaatcgatccggtgggtatgttcgcgtgggtcctgtcggaagaagtccaagggcacgctgaaaaccgcggcaatctccgcatcgttggccaggtattcgacgtaatcagggatcacgccgacatacggcgtgacccgaatgccatgcagggagatcaaggggctcagcgggccgatgacttcgaccaggccgggtggcaggccgatctcttcttccgcttcacgtagcgcggtgaagatcaggtccgggtcttcggggtcgcggcgtccaccgggaaaggccacttcgccaccatgggtcgacaggccgctggcgcgcagggtcaggatcagctcaggttcgtcactgcgggtaatcggcaccagcaccgcggcctcggggaaacgcccgtcggcttcaagcaggtggggggtgtggttgcttacccgtcgaagtagctcgtccagcatgagtcatctcggtctgttggctaccttgcatcatgcaccaaagcgtacgggcgcccaaccccaaaacccgcccggtgtcgctaaacgacaacttgcagcgccctgcccgtcacgccaagatagacgcactttccaggaaccccagcatgaatttctgcagccagtgtggcaaaccggttacccaacgcatccccgaaggcgatggccgcctgcgctttgtgtgtgatcactgctcgaccatccactaccagaaccccaatatcgttgctggcacggtgccggtgtggggcgacaaagtgctgctgtgccgccgcgccatcgagccgcgcctgggttactggaccctgcccgccggtttcatggagaacggcgagacggtcgaacaggcagccgctcgcgaaaccctggaagaagcctgcgcccgcgtgcacaacctgagcatctacacgctgatcgacgtgccgcatatcaaccaggtgcatatcttctaccgtgccgacctggtggacctggactacgccgcaggccccgaaagccttgaagtgcagctattcgacgaagccgacatcccttggtccgagctggcgttccgcacggtcgggcgtaccctcgaatactatttcgctgaccgtcggcagcaggccttcccggtgcgcagcgaggccgtagagccgcgggtgttgcccgctccatgaccagggataccgttttaatgcgttggctgcttgcgcttatctgcctgtcgttcgcgaccctgtcatcagcctcgaccgtggaaaccctgggcggcaagaccgtcgaaaaggtcctggtgctcaagtccgcccatcagttgcagttgatcaacgacggcaagccgctcaagacctaccgcatttccctgggcaagaaccccaagggccacaagctgatcgagggtgaccgccgcacgccagaggggctctactggatcgactggcgcaagaccagcgaccgcttcaacctggccatgcacatctcctacccgaatatcagcgacgccgcccgcgcccgccgcgaaggcgtgaaacccggcagcatgatcatgatccacggcacccccgataccgaggaatacccggagcagtggttccacaccctggactggaccgacggctgcatcggcatgcgcaacgtggatatgcgtgaagtctggaacctggtcaaggacggcacactgatcgagattcgtccgtaatctcgtaccgttcgtaaaataattcaaaaaaaattcccatcccagcctgcgcccgccggtgaataccagttcatccccgcgggctgcgccgttctgcgcgcgataaagacctctctaataccacttgataccaggccccattgcagggcccttaaatcagtgaacgcactgttttcgctgcattgacatggtatttaagtggtattaatttccggccaataccgggcgacaacactccaataaccgcatcggaaacctgacagatgaatcccatcctggccctgcgccccgacgacaaacaatccacgccgctgtacctgcaattggcgcgcaaactggaagcagcgatccatgccggccagtggacgtccgaacaagccctgccatcggaacgcgtactcagcgagcaactgagcatttcgcgagtcaccgctcgcaaggcgctggaagtgttgtttgcccaagggctgatccgccgcaaccaaggctccggcacttacatttcgccacgcctggagcagccgctgtcgcgcctgtcggggttcagcgagatgctgcgactcaagggttttgtgcccagctcccaatggctggagcgtgaactgacccagccgacccacgaagagatgatccgcctgggcctgtcgcccgccgacaaagtggcacgcctcaagcgcttgcgtaaggcggacgacacggtgatggcgattgaaatgagcaccctgcccgccttggtgctgccgcagccccaagccatcggtcattcgctgtacgaatacctggaaggcatcggcaaaccggtggtgcgtgccctgcagcatatccaggcgatcaacgcctccgacgagttcgccaagctggtcggcatcgcccccggtaccgccatgctgctgatgacccgggtcggctacaccgccgacaacacgccgattgaaatcaccgacacctactgccgcaacgactactacgacttcgtcgcagagctgcgccgccatgactattccgctgaactgcgaatttagagaactgcccatgtccgaagacaacatcctcacgcccaacggctggattcgcggccgcctggtgcacgagcacggcaaggtggtcgccatcgaaggcgacccctgcgacccggctgacaacgaccggccctacctgctgccaggttttatcgacctgcacgtccacggcggcggtggcaaggacatcatggaaggcagcgatgccttcgagaccatcacccgcacccacgtgcgtttcggtacgacttctctgctggctacgaccatgactgcgccggtggatgaaatctcaagcgtactcggccagctcggcaccttctgcgaacggcgtccgacgggcagcgcccgcgtactgggtgtgcacctggaagggccttacatcaatccgggaaaactcggcgcccaacccaactttgcccacaccgcattgatggccgaagtggaagcctacctgcgcctggcgccgatccgtgtaatcaccatcgccccggaaatcgccggccacgatgccctgatccgcgccctcagtgaacgcggcgtgcgcatgcagatcggccataccctgggcagctatgaagaaggcgtcgccgccctcgctgccggcgccaccagcttcacccatttgtacaacgccatgagcccgctgcatcaccgcgagcccggcatcgtcggcgccgcactggcccacgccaagtacgccgaattgatcccggatttgctgcatgtgcaccccggcgccatgcgcgtggctttgcgctcgatcccgtgcctgtactgcgtcaccgactccaccgccgccgccggcatgcccgatggtgaatacaagctgggcagccacaccgtgaccaaatgcctgggcggcgtacgcctggccgacggcaccctggccggcagcacgctgaccatggaccaggcgctgcgcaacctggtgaagatcggcctgcccatcagcgaagcctcacaacgcctgtcgcaatttcctgcggactacctgggcctggaagaacgcggtcgcctgcaacccggcagtttcgccgactgcgtgcgcctggaccgcaccctgacactcaccgacgtaatggtcgaaggagaaaccattgacttcaaaaatgcttgaagaggccctggcctcctgcgacgccgtgtcggcgcaattgcaacgcctggacccactgctggaagaagtcgccggccgcctgcgccgccagccgccgcaagtggcgatgaccatcgcccgcggcagctcggatcacgccgccagctacttcgcctacctggccatgcagcacgtgggcatcccggtggcgtcgttgccaatgtcggtggtgaccctgctgcaagccccgttgaaagtcagcggccaagtggcgttcggtttctcgcagtcggggcaaagcccggacctggtcaacagcttgcgcctgctgcgcaaacgcggcgccctgagcatttcgctggtcaacgctgaagactcaccgctggaagccgcctgcgaattccacgtgccgctctgcgccgggccggagcaaagcgtcgccgccaccaaaagttttatcgccacactgagtgccagcgcgctgctgattggccactggaaccaggaagccgacttgctgcaagcctgccgcgccttgccggacgaactgcgtgccgccgccaggcaggactggacggtcgccatcgacgccctgcgcgactgccagcaactgatggtgatcggtcgaggcgccggttttgccatcgctcaggaagcggcgctcaagctcaaggaaacctcggcgatccaggccgaagccttcagcagcgccgaggtacgtcacgggccgatggcactgattggcgacaactaccccctgctggtgttcgccccgcgcggcgccgagcaagccggcctgttgagcctggccgccgacatgcgtcaacgcggtgcccgcgtgttgctggctgcgccggacgatatcgccgagcgtgacctgaccctgagccgcgccgaacatccgaccctggacccgatcctggcgatccagagtttctacgtgatggcggcaggtttggccgaagcccggggcatggacccggaccagccgcgtcacctgagcaaagttacccgcactcactgagtggcgttttcctgatgagtaccgtgcccatgtccaacaacaataatgacctgaccctcagcgcccccctcagcggaccggtgctggccctgggcaacgttcccgacgaagtgttcgccagcggcgccatgggcgagggcattgccatcgacccgttgaatgactgcctgcatgcaccctgtgacggcgtgatcatccacgtcgcccgcaccgggcatgcgctgacgatccgcgctgacaacggtgccgaaattttgatgcatgtgggcatcgatacggtggaactgaacggcgaaggcttcgccttgctggtgaaggatggcgcgcgggtaagcaagggccaggcgctggtgcagtttgatctggaccgcattgcacgccagtgcaagagcctggtcagcctgatcatcctgaccaatggcgagcgcttcgagttgcgctcggtggcggctagaacggtcaaggtcggcgagccgttgttgcagatcgtggcgcgttcggcgacgtcggtatcgacgcctgtggataactcggcgggtgaagccagcgcccgcgtacgcatcacccatcgcggtggtttacatgcccgcccggcggcgttggtgcgcaaggctgcgcagggtttcagcagccaggcctcgctgcactttggcaataaaaccgcctcgtgtgacagcctgatcggtttgctgggcctgggtatcggtgaaggggatgaggtgcgtgtgagctgtcgcggcaaggatgccgaagcggcggtgcaggcagtgatcgcggccttgtcagccgtcgtcaaggaagaacaccacaccccggtggccgccgcgccccgtcgggtcaataccgaagtgggtgtgttgcaaggcgtgtgtgccgcgccgggcctggtctgcgggccattgttccgcctgaccggtatcgaactgccggcagacaccggcaagcatgctgccgacgagcaactgcaacgcctggacgccgccctggagcaggtgcgcagcgaaatccgcagcaccctggatcatgcgcgccagcgcaggaacgttgaagaagaagacatcttcgccgcccacctcgccctgctggaagacccgaccctgctggacgccgccaccggcgccatcgagcagggcagcgccgccactcatgcctggcgcgacgcgatccaggcgcaatgcgccgtgttactggccctgggcaaaccgctgtttgccgaacgcgccaatgatctacgggatttgcagcaacgggtactgcgcgcattgctgggtgaagcctggcacttcgaattgcccgcaggggcgattgtcagcgcccacgaactgaccccatccgacctgctgcaactgagcgcgcaaaatgccgcaggcatctgcatggccgaaggcggtgccacctcccatgtggctattttggcccgtggtaaaggcctgccctgtgtggtcgcgctgggcgccgaagtcctcgatgtgccccagggccaacgcgtggtcctcgacgccgccaacggcaggctggaactggcgcccagcgatgcgcgccacgccgaagtacaccagattcgcgatgcgcagaaactgcggcgccagcaacaacaggcccaggcccgacagccggcacgcaccgccgatggcgtgagcatcgaagttgccgcgaatgttgcctccagcgccgaagccttggtggcgtttgaaaatggcgccgatggcgtcggcctgctgcgtaccgagtttctcttcgtcgaccgccgcaccgcgccggacgaacaggaacaacgccaggcctaccaggccgtgctggatgccatgggcgacaagtcggtgatcatccgcaccatcgacgtgggcggcgacaagcaactcgactacctgccgctgccggtcgaggccaacccggtgctgggcctgcgcggtatccgcatggcccaggtacgcccggaactgctcgaccagcaactgcgggcgctgctgcaagtcagcccgctggaacgctgccgcatcctgctgccgatggtcagcgaggtggatgagttgttgcagattcgccagcgcctggacgagttgtgcgccgagttggaactgacccagcgccccgaactgggcgtgatgatcgaagtgcccgccgccgcgctgatggccgagcatttggccaaacatgccgacttcctgtccatcggcaccaatgacctgtcccagtacaccctggccatggaccgcgaccacgccggcctcgccgcgcgcgtcgatgcgctgcacccagcgctgctgcggctgatcgcccagacctgcgcaggcgcggcgaaacacgggcgctgggttggggtctgcggcgccctcgcctccgacccgctggccacgccggtactggtcggcctgggggtcagcgagctgtcggtgagcccgccgcagatcggagaaatcaaggatcgcgtccgccacctggacgcggcgcaatgccggcaactgagccagggcctgctcgacctgagcagcgcccaggccgttcgccaagcctgtcaacaccactggccgctgagctgacaacaacaagaaaaaaggagactcgccatgtaccaacatttcatcgaaggcctgcaacgcctgggtcgtgcactgatgctaccgatcgcgatcttgccgatcgccggcctgttgctgcgcctgggcgacaccgatcttttgaacatcgcggtgatgcacgacgccgggcaggcgatcttcgccaacctggcgctgatctttgccatcggcatcgccgtgggttttgcccgcgacaacaacggcacggccggtttggcgggtgcgattggctacttggtgatggtttccacgctcaaggtgatggacacgtccatcaacatgggcatgctcgccggtatcgccagtggtttgatggcaggcgggctgtataaccgcttcaaggacatcaagctgccggagtacctggcgttctttggtgggcgacggtttgtgccgattgtcaccgggttttcggcggttgcgctgggtgtgatctttggcctgatctggccgccgatccagcacggcatcaacagcttcggcgtgttgctgatggagagcggcagcctcggcgccttcgtgtttggcgtgttcaaccgcctgctgatcgtcactggcctgcaccatatcctcaacaacatggcgtggttcgtgtttggcaccttcaccgacccggtgaccggtgccgtggtgaccggtgacctgacccgttactttgctggtgaccccaaaggtggccagttcatgaccggcatgttcccggtgatgctgttcgggctgccagcagcgtgtctggcgatgtaccgcaatgcgttgccggaacggcgcaaagtgatgggcgggattttcctgtcgatggcgctgacgtcgtttctgaccggggtgaccgagccgattgaattcgccttcatgttcctcgcgccgtttttgtacctgatccatgcggtgctgaccggcctgtcgatggcggtcaccaatatgctgaatatccacctgggctttaccttctccggtgggtttatcgacatggtgctgggctggggcaagtccaccaatggctggctggtgttcccggtaggcctggcgtatgcgctgatctactacagcgtgttcaactactgcattcgcaagttcaacctgaagacgccggggcgggaagatatccaggtggtgcaggctgaggtgatgacggataaccagcgcgccagtgcctatattcgtgcgctcgggggtgcggcgaacctgctgagcgtgggtgcgtgcactacccgtctgcgcctggacatggttgatcgcaaccaagcggtggatgcggagctgaaagcactgggcgccatggccgtggttcggccgggtaacggcgggagtttgcaggtggtggttgggccgatggcggatagcattgctgatgaaatccggctggccatgccttcgtttgttgccagcgcgccggtgaaggtttcccctgtggataagccggtggcggtgaatgtgcaggaggccgagaagtggctgagtgcgttgggtggccaagcgaatgtgcggcagttggaagcggtggcgatgacccgcttgcgcgtggagttgggagatgattcggggctgtctgaagctcagctcactgcgctcggttgccaaggtatgagtcagcttgagagcggtgtttggcacctgttgattggtgacaaggcttccgggttgggtgaggcgttggagcggttggtcagtggtcgagaggtcggcgccagggtttagagatgcagtggctgttctcgcctcatcgggggcaagccccctcccacagttgaccgcattgccaaggtgggagggggcttgcccccgatgaggcc

SEQ ID NO: 52 - DNA, 189970 bp, Pseudomonas nodulensis
aagccccctcccacagttgaccgcattgccaaggtgggagggggcttgcccccgatgaggccctgacagacaacaaaaaacccgctgaccaaactggcccagcgggtttcttgtttttgcagcatgcgaatcaaaagtccgccaactgccacacctcataggccggtgtctcatacgggtggctgagtttcaaagcagccacaacagccacaatcaactcatccgccaccaccaactccaccttccactcttcaaccccttcaacctggcccacctgtccgatgaacggctggctgccgtccaacgcgcggaattggccctggcccagcacttgccaggcgcagctgtcgtagttgccgatgcgcccgccgccggcggcaaagacggcgatcttcaccgtctccacatggctgtcgggcacaaagaaggcgagcttgtacaccgtcttagttcacccacacgcgggcgttacggaacatgcgcatccaggcgccgtcttcgttccactcttccgggcgccacgagttttgcacggcgcggaatacacgctccgggtgcggcatcatgatggtcacgcgaccgtcgcggctggtgaggccggtgatcccgcgcggcgagccgttcgggttggccgggtaggtctcggtgaccttgccatggttgtcgacgaaacgcatggccacgcaaccggacaggtcggcttccaataaagcttcttcgctggaaaactcagcgtgaccttcaccgtgggcgatggcgattggcatgcgcgaaccggccatgccttgcaggaagatcgagttggactcctgcacctgcaccatggcgacacgggcttcgaactgctcggaacggttgcgcacgaagtgcggccagaactcgctgcccgggatcagctcgctgaggttggacatcatctggcaaccgttgcacacacccagggtgaagctgtcgttgcgctcgaagaaaccctggaacgcatcacgcgcacggctgttgaacagggccgatttggcccagccttcaccggcacccagcacgtcgccgtaggagaaaccgccgcaggccaccaggcctttgaactcgttgaggtcaacgcgaccggcgaggatgtcgctcatgtgcacgtcgatcgcattgaagccggcacggtcgaacgcggccgccatttccacctggccgttgacgccctgctcacgcagtacggcaacctgtgggcgaatgcctttcttgatgtaaggcgcggcgatgtcctggttgacgtcgaagctgagcttggtgctcaggcccgggttgtcttcttccaggatcacgtcgaattcctgctcggcgcaatcggcgttgtcacgcaggcgttggatctggtagctggtctcggcccactggcgttgcagcaagcggcgctgaccggcaaaaacagtatcgccgttgaaggagatgttgatctcgccgttgttgatcggctggccgatcaccgccacgcagtcgtccaggccggcggcgctgaactgtgcaagtacgtccggggtagcgtcctggcgcacctggatcaccgcgcccaactcttcgttgaacaggatgccgttgatctcggccgcatcctcggcaacgctgtcgagcacgatgttcaggccgcaatgaccggcgaaggccatttcgacgacgctggtcagcagaccaccatcggaacggtcgtggtaagccagcaggtggccgtcggcattgaggccctggatcacggcgaagaacgccttgaggtcttcggcgtcatcgacgtccggtgcctgtttgccgagcttgccatgggtctgcgccaggatcgaagcgcccatgcggttctggccacggcccaggtcgatcaggatcaggtcggtggtgcccttgtccatgcgcagttgcggggtcagggtctggcggatgtcggtgaccggtgcaaaaccggtgacgatcagcgacagcggcgaggtgactgtcttgtcgacgccgtcttcgttccaacgggtggccatggacatggagtccttgcccaccggaatggtgatacccagctcagggcacagctccatgccgaccgccttgacggtgtcgtacaggcgcgcatcttcacccgggtggccggctgcggacatccagttggccgacaacttgatgtcggacagcttaccgatgcgcgatgcggcgatgttggtgagggtttcaccaatggccatgcggcccgacgccggagcgtcgagcagggccagcggggtacgctcgcccatggccatggcttcaccggtgtagacgtcgaagctggtagcggtgacggcaacgtcggccaccggaacctgccacgggccgaccatttggtcacgggccaccaggccggtgatggtacggtcgccgatggtgatcaggaagctcttgctcgccacggccgggtggtgcagcacgcgttcgatgctgtcggccagttccagcgtgcttgggtcgaaatcatcgcccagctcggcttcacgcacagcggaacggtgcatgcgcggggctttgcccagcagcacttcgagcggcatgtccaccgggctgttgccgaagtggctgtcggtgaccgtcagttgcggctcggcagtggcttcgccgaccacggcgaacgggcagcgctcacgctcgcagatggcttggaagcgcgcgaagtcttctgcgccaaccgccagcacgtagcgttcctgggattcgttgctccagatttcgtgcggggccatgcccggctcgtcgtttggaatattgcgcaattcgaagcggccaccgcggtcgccatcgttgaccagttccgggaaggcgttggacaaaccgcccgcgccgacgtcatggatgaagctgatcgggttcttgtcacccaactgccagcaacggtcgatgacttcctggcagcgacgctccatttctgggttttcgcgctgtaccgaagcgaagtccaggtctgccgagctggtgccggtggccatggaggaagcggcgccgccgccgaggccgatcagcattgccgggccgccgagcacgatcagcttggagccgaccaggatctcgcctttcttgacgtgttcttcacggatgttgcccatgccgccggccaacatgatcggcttgtggtaaccgcgcacttcatcgccacgcggggtggtgatggactgctcgaacgtacggaagtaaccggtcagggccggacgcccgaattcgttgttgaacgcagcgccgcccagtgggccttcgatcatgatgtcgagcgcggtgacgatgcgctcaggcttgccgtacggcacttcccacggctgttcgaagcccgggatctgcaggttggagacggtgaaaccggtcaggcccgccttgggcttggcgccacggccggtggcgccttcgtcgcggatttcgccgccggaaccggtggctgcgcccgggaacggggcaatcgcagtcgggtggttgtgggtctcgaccttcatcaggatgtgcaccggctcctgcaccgcgccgtactggcgggtctcagggtccgggaagaaacggccggcgacggagccgacgatcaccgaggcgttgtccttataagcagaaagaacaccttcgctgtgcatcacgtaggtgttcttgatcatgccgaacaggcttttttcctggctttcgccgtcgatgtcccaactggcgttgaagatcttgtgacggcagtgctcggagttggcctgggcaaacatcatcagttcgatgtcgtgcgggttgcgcttcaagccgttgaaggcattgaccaggtagtcgatctcgtcttcggccagggccaggcccagttcggtgttggccttctcgagggcggcacggccaccaccgatcacgtcaatcgcggtcagcggcttgggctcggcgtggctgaacaggccggcagcctgttccagctggctgacgatgatctgggtcatgcggtcatgcaggctgctggcgatcagctcggcctcggcatcgctgaactggccggcgacatagaaagcgataccacgctccaggcgctggattttctccaggccgcagttgcgggcgatatcgctggccttgctcgaccaaggcgagatggtgccgaaccgtggcagaaccaggaacaagcggccagtcggctcttgaacgggaacgcttgggccgtacttcagaaggcgtgcgagcacttgctgttcgtcggcggtcaatacgccggtaacgtcggcgaagtgagcaaattcagcgtacaggcctgtaacagctggaaccttctggctcagttgctcaaggagtttgctgtggcgaaaggcagaaagggcaggagcgccgcgcaggatcaacatcttcgggacagcctcgggaagggggtgtgctttgaggccgtgcattctagcgtaaaccgccgccaacggcacccgaaacgctaccggtggctgccgccgaacgtcagttggccggattacacccctttcgcggggtcatagggggcattcggcgcagttattttaaccgtcacaatccctcgccaagccgcgtttctgcgggttgcagcacagttttgccagcgctagcagacaacgcccatgctgtcgagatatggcgccgtgggccgtttgcgtatactgcgcagatgttctccccaacggctttgcgaccgcgatgcgccaaatggctcatcgccaccggactcttcctgatgctcagcgcctgtgttgataaacccagcacgctcgagcgaatcaaggaggatggcgtattgcgggtgatcacccggaacagcccggcgacttatttccaggaccgcaacggcgaaaccggtttcgagtacgaactggtcaagcgcttcgccgacgacctgggcgtgaagctggagatcgagaccgccgacaacctcgacgacctgttcggccagttgggcaaacccaacggcccggtcctcgccgccgccggcctggtcagcagcgaacagcgcaaggcgcaggtgcgtttctcccacccttacctggaagtcaccccgcagatcatctaccgcaacggccagtcccgcccgacgaacgcggcagacctggtgggcaagaagatcatggtgctcaagggcagcacccacgccgaacaattggcggcgcttaaaaagcagaatcctgcgattgaatacgaagaatccgacgccgttgaggtggtcgacctgctgcgcatggtggacgaggggcaaatcgacctgaccctggtggactccaacgaagtggcgatgaaccaggtgtacttccccaacgtgcgcgtggcgttcgacctcggcgatgccagcaaccagagctgggccgtggcgccgggtgaagacaacagcctgctcaacgagatcaacagctacctggataaagtcgaaaagaacggcacgttgcagcgcctgaaagaccgctactacgggcacgttgatgtgctcggttatgtgggtgcctacaccttcgcccagcatctgcagcagcgtttgcccaagtacgagaaacacttccgcgcctatgccaaggaagaaaaggtcgattggcgcctgttggccgccatcggctatcaggaatcgctgtggcagccggccgtcacctccaagaccggcgtgcgcggcctgatgatgctgacccagaacaccgcccaggccatgggcgtgtccaaccgcctggatcccaagcaaagcatcatgggcggcgccaagtacctggccaagatcaaggatgaactggacgacagcatcgccgagccggatcgcacctggttcgccctcgccgcctacaacgtcggcaccggtcacctggaggatgcgcgcacgctggccaagcgcgagggcctgaacccgaacaagtggctggatgtgaaaaagatgctgccgcgcctgtcgcagaagcagtggtacagcaagacccgctacgggtatgcgcgaggcggtgagccggtgcactttgtggcgaacatccggcgttactacgacatcctcacctgggtgacccagccgcagctggagggcaaccaggtggtcgaaggcaacttgcatgtgccgggtatcgacaagaccaagccgccggaagataaccctcaattgtaagaacaccacaaaacccggtgggagggggcttgcccccgatagcggtgtgtcagttactactaagctggcagatacattgcaatcgggggcaagccccctcccacattgggatctctaccgggcttagaggccggtaagcaggtggaccactccgcctgcgagcatcatcactgccggtactcccgccgccttcaacgccacctcatccaaccgccccacatcctgcaactgcaccctcacccgcgtcaacgccacacgctgctgcgacttgaggttgtccgcgccgcccagcgcgctgattacttcggccggcaatagactctgcgtcggtgttgctacggtctcggcaatcaaatccggcgtcagggccttccagaacgcccgctgcaatttctcgaacatgctcaaagctccatgacaggtgaggtttcaacggtagctgcgtgatattggcgcagggcctcacgcacttgggcggcttcttccaggcccaacacttggcgggcgatgatctggcagtcggccaggtccagttcgcgcacggtggccttgatggtggggatcaacggcacgctgactgacaactcgtccacgcccagcccgatcagcaccggcgcggccagcgcttcggaggccagcgcaccgcacacccctacccacttgccatgggcatgggcggccttgacggtggtggcgatcaggcgcagcaccgccgggtggaagctgtcggcctggctggccaggcgcgggtggtcgcggtccatggccagggtgtattgggtcaggtcgttggtgccgatggagaagaaatccacgtggggcgcgaacacatccgccatcagcgcggcggacggtacttcaatcatgatgcccagcttcggcagctcggtaagccccagcgccagcgcttcctcttccagaatcttgcgcgccaggtgcagctccgacagcaggctgaccatcggcaacatgatgtgcaggcgcgcaaaaccggcgctggcaaggatcgcgcggaactgttcgcgcagcagctcaggacgttccaggcacaggcggatgccgcgcaggccgaggaacgggttggtttcggcatccatcggcacataggccaacggcttgtcaccacccacgtccagggtgcgcaccaccaggttgcgctcggtgcccagggcacgggcgatggcggtgtaggtggctgcttgttcatcggggcctggcgcacggttgcggtccaggtagagaaattctgaacgcagcaggccgacgccttcaccgccgagggtcagggattgctcaacttcctgcaaggaggccacgttggcggtgacttcaacgtgatggccgtcgcgggtggtggcgggcaacgacgcctgcgccacatcgcgctgatggcgcagcacctgttgcttgcgggcagtttccaactgctcgatttcggccaggttcggctccaggtgcagctcacctttgtcggcgtcgagcagcacctgtttgccattggccagccccagaacctcggctgaaacaccgcaaatggccggcaggccaagggcacgggccaggatcgcgacgtggctggtcgcgccaccgccgacagtgacgaaccccagcactttgcgggtatccaggctcgccgtctgcgaaggggtcaattgctcggcgatcaggatcgcgcgctccggcaagtcccaggcgctgtcctggatgcccaggatcagtttcagtacgcgctggccgacgtccgccaggtctgccgcgcgctcggcgatcagcgcattgcccaggccctggaacagcttgacggtcgcgagcgtggcactgttccaggcaaacgcggcgctcttgccctccgccaacaaactgtgggcgtgttccagcaaggtcgggtcttcgagcaattcctggtgagcgcgaaaaatctcggcctgggcactgccagcagccttgtcccgcagcgcctgcaatgcctcagtggcagccagcaggccacgcttcaaagcagcacgctcagtggcttcacccgtgccatgttcagtgatggtcaactcaggttcagtcacttgaaccacctggccaaacgccgaccccggcgatgcacacacgccacctagcacggtcgccgacgactgcgttgccaacggctcggcaacgctcgccactacctcgccacaaccttcagccaacaaggccaccagcgccttgatcgccacttcggcatcctcacccgcagcgctcacctgcaaggtatcgccgtgcacggtttgcagcgccatgatcgctaccagtgatttggcgttggcgctctgggtttgcttgtgcaggtagatgctcgccttgaagcccttcgcggcctgggcgaacaccgccgccgggcgggcgtgcaaaccgttggcattgggcaaagtcagcggtttggagaacagtgcgtcgccctcctcttcgtccactgtgtcaacggcttcacctggggataactgcaacagcggctggccgacctctacacaatcagtggccaacacgctgaacggctcgccgctgaccaccagcatcaaggtcagcagactgcgcgcatggagcgccacatagtcggcatcgaattcgatcagcgcctgcccggcctccacccgctggccttcctgcaccaaccgggtgaagcccttgcccgccaggttcacggtgtccaggccgatgtgcatgagcacctggacgccgttgtcgtcggtaatgctgacggcatgaccactgtcctggatattgctgatcgtcccggccaatggcgcgcagagggtctgcgacgtggggtcgatgcacaggccatcgccgatcaggcggctggagaagaccgggtcgggcaccttgtccagcgccagcagcacacccgacaagggcgccagcaattccaggggttgcgttgtggtcatgacttcacctgctgttttgttctgtagatatattgagcggaggaaggatcacttccaccagtactcaacctgcacaccaacgttcgacccatgccgcgccgtgccatacgagccggtatcggacaacgccgaccccgccgccaattcattcgccgcacgcttggccgcttcgttccaggtggcataggtgtagtacaagcgcacctccggccgcgcccagaaatccgggcctttgggcgaccaggtcggggcgaaggtgaatttgctcagcttgcgcgtcccgcccgtagcctcgacctgatcatgcccaagctccgtgaccagtttgaactgctcgctgatggcgtacgccgggcgcacaccgagggacatccaggtctggtcctggctgcccggacgaatatccttctggtacaccgcttcgatctgcccaccgaaacgcggggtcacctgccagtcgaaaaactccacggcgcggtaacttttgctgctgttgtccaggaaggtattgccggtgtaacccaggccggtgccggggccttcgccgtactgcaaggcgaacttgttcttgccgcccaggaaaggtttttgcacgtgctgcgcggtgatcgcccagccgctgttggtgtcacgcccgccggctttttcgatgtagctaaggcccagctccagctccccgccggggttggtcttgaagcctgcaacgttgaagtcatgacgggtcgcgtattccttctggtacaggttgtccttacgagaaatggcgtagctgtacttgaggtcgccgatcagcacgtcctcgataccaccgcccgtggcgctctggttccagtagtagaagtcggagatatggatgtcattacgtttgtagtaacgccggccggcccacagtgaaccgccattgaggctgggcaggttggaccactgcgcatacatctgcggcatgcgcgcggtgccgttgtcttcgccctggaacttcagcgcgcggtcgtacttgttgtagagcgatgccatggcatcgacgctgagcaccgagccgtcgtcgagggtgagcaggtcctggcgcagctccagctcggcgtattgctcgcattcgttacccaggcggtacttggattgcgcccccggcagttggaagcactgctgcgggccgctgcccgtggaagtgcccgcgccgctgcgcaggtaaccggcaaattccagggcttgagcgccgaacggcaagcccaggcaagacgcaacgaggcccagctttattgttgttttcatgaagcactccgatatttttattatgttttttgaagcgccccgtgctcccacacggggttacaacaggtctcagtccttgaggtgcagcacgaacgattcgtaaggacgcaatgcaaccgtgcccgttcgcaccgggcagtcggggtagttgctgatcagcaggcgttgctcggtcgcctggttgatcacgttgtccggcagttggatttcgcagggcgtgccgtagaagttgttcagcaccagcagacgctcgccctggccttcgcgcaggtacgcccagacttgcgagtggccttgcagcagctcgcgataaactccttcttggatcagcggttcatgacggcgcaacgcaatcaatgcgcggtagtgatgcagcacggactcggggtcatccagctggctttcgacgttgatgatggaggcgttggccggaatgccaatccagggttcaccggtactgaaaccggcgttctccccggcatgccactgcatcggcgtacggccgttgtcgcgggacttctgcatgatcgccgccatgctcgacgccgcggactcccccgcatcgcgcttgagacggaagatgttcagggtctccacatcgcggtactgctcgatccggtcaaagcccggattggtcatgcccagttcttcgccctggtacacatacggcgtgccctggagaaagtgcagcgcggtggcgagcatcttggccgagaccacgcgatgctcgccgtcgttgccaaagcgcgagaccacccgcggctgatcgtggttacaccagaacagcgcgttccagccaccaccggcctgcatgcccagttgccagtcagagaagatctgcttgagttgcaggaagtcgaagtcggccttcacccacttctgcaggttcgggtaatcgactttcaggtgatgaaagttgaaggtcatcgacagttctttcgacgcaggattcgagtagcgaatgcaatgctcgaggctggtggaggacatctcgccgacgttgatcaggtcatgcccttcgaagacttcgcggtgcatttcctgcaggtattcgtgcacgttcgggccgtcggtgtagaagcgccggccatccgtgctgtcctcggggaaatcggcgggcttggagatcaggttgatcacgtccaggcggaagccgcccacgcccttgtcgcgccagaagcgcatcagcttgaacacttcggcacgcaccttggggttgtcccaattcaggtctgcctgggtgtggtcgaacaggtgcaggaaatactggccggtttgcgcctcgtattcccaggccgagccgccgaacttggattcccagttgttcggctggtcgcgccagatgtagaagtcacggtacgggttgtcgaggctgctgcgcgcctgctggaaccattcgtgttcgatggaggtgtggttgaccacgatgtcgagcatcagcttgatgccgcgcttggccgcttcgctgatcagcaggtcgcagtcggccatggtcccgtagctggggtcgatggcgtagtagtcgctgatgtcgtagccgttgtcgcgttgcggcgagcgcaggaacggggtgatccacaggcagtcgacgcccagccatttgaggtagtcgagtttgtccacgatgcccagcaggtcaccggtggcgttacccgcgtggctgtggaagcttttggggtagatctggtagatcaccgagtgttgccagtcttgcatggtgggttccttcagttgattgttgtgcaggcctttcgggcctcatcgggggcaagtcgagtcgtcgcaccgcccctcccacatttgaaatgcgttccaatgtgggagcgggcttgcccccgattgcgccggttcaggcgacgcgatacccaggccgaacaatcttcatgctcaacgcacaggtcaaaacgaacggcacgacaatcgcgatcaccatcccgatcacaaaactggggatgtactgcggcatgatcgaaatgaatccaggcaagccaccgacgccgatcgccgacgcctgcaccttgttcagcgacaggaaaatactgcccagcgccgagccgagcagcgcggcatagaacgggaacttgaagcgcaggttcacgccgaacattgccggttcggtgatgccgaaatacgcagaaatcgccgaggtcgaggccatgcttttgtcccgcgcattgcgggtcatgtagaacacaccgagcgcggcgctgccctgggccaggttggacatcacgatcatcggccagataaaggtgccgccctgggtggagatcagttgcaggtccacggcgaggaacatgtggtgcatgccggtgatcaccagcggcgcatacagaaggccgaaaatcgccccgccgaccatcggcgccaggtcaaacagggtgaccacgccttcggtgatcaggatgccgaggtgacgggtcaccgggccgatgatcgccagggcgagcacgccggtaacgacgatggtggtgatgggcacgacgagcagctgaatcgcattggggacgcgtgcgcgcaaccatttctcgatgacgctcatcacatacgccgccatcaggatcggcaggatctgcccctggtagccgactttttcgatcttgaaccaaccgaagatatcgaagtacggcaggctctggccgtcgagaccagcgaccgccttgccgtagttccaggcgttgagcaggtccgggtgtaccagcatcaggccgagcacgatcccaaggatttcactgccgccaaaccgcttcgccgccgaccagcccaccagggccggcaggaacacgaacgaggtgttggccatcaggttgatcaggctccacaggccatccagattcggataggcctccagcagcgtcttgccctcgatgaacatgcccttggcacccatcaggttgttcacgcccatcaacaggccggcgatgatcaacgcgggcaggatcggcatgaacacatcggagaacacgcgcaccaggcgctgcatggcgttggtcttgtcggcgcccttcttcttcacgtcagcgatagtcgcggcggcgaggccggtctgttcacgcagggcggcgtagaccttctccacttcgccggggccgatcaccacctggaacaatccaccggtgaagaacgagcccttgaccagatcgacctggttcagcgcgcggctgttgaccaggctcgggtccttgagcgccaggcgcaggcgggtcacacagtgggcagcttgctcaaggttgtcgctacccccgaggttctcgagaatctcgcgggcgatagtcgaatagtcgtggctcatgcttggtttccactttggtttttttttattgggggcagtcattggcagcacgccgagggcaaaagtactcgtctgtacgagttaaagcaacaactcgtctgtacgagttacatattgtttattttttgtaggacgccgcaccgctgcgcgccgcataaatccaagggtccaatggacaaaccccagccgggccactaaggttcctgccttgaccgcaaccccggcaaagagccatccccatgagcaaatacaaccagatctatacggatctgcttgccagcatcacgactgaacgcctgcaacgtggcacgcgccttccctccgaaaccgaattgatgaacagctaccaggccagccgaggtaccgtgcgtcgcgccatcgagcagttgcaggagcgcgggtttgcgcaaaagatccacggcaagggcaccttcgtgttgtcgcccaacccgatcgagttccaactcggcggcatcgtcagcttccacgaaacccacgccgacctgggcgacgacgtacgcactgaagtagtcgagttcacccaattcccgctggaaggctcactgctgcaacacatcgaagccgaacccggcaccctgatcacccgcatcaaacgggtacggcgcatcggcggcaaacgggtgatcctcgacatcaaccacttcgtggccgacgtgatccccggcctggaccgctcgattgccgagcagtcgatctacgcgtttatcgaacagactttgcaactgcaaatcgcctacgcccaacgcaccatcgaagccctgccgcgcagcaaggatgaccagacacacctcgacctcgacggtcagagccatgtgatcgtggtgagcaaccagacgtttttgcaggacgggcggcagttcgagtacaccgagtcgcggcatacgttggataagttttacttttcggatattgcgcggcggtaggcacaagtcggggaggtcattgcaccgcgatactcttggccagtcctgccgtccacgcagcagtcatcttctcccctaccagcaccttgggttgaacacccgacacccccgagtaggtggcgtagattttcagaaggtcgtcaaacaggtctttggccccgtcatagaccaacagctcggagagcttgacctcaggcggtgactcaccatccgcgtcatgggcaacgctgatacgccccaactgatgcgggcctacaatgctcaacaacgcgaagtcgtcaaagccgcgcaccgacttgctgaagcgtcgcacaagttcgtccttgagatgtccctcggggatatgcatctcgaacagaggatggactccatactcccagttgtagctttccaggcgcaccggcatggtcagggagacggcattctcttcgctgacggtgtcgttatatgagaaaaccgtatcgcggcagctctcctctccctgcccgagcgttcccgcaggcacgccgccttcgccgatatagagccgctcacgtcgactggtcatggatattctccgatttcagctcatcaagggtcttgcgccgacgtttggggatggccgtcaactcatatcccaagccctcaagaatggctgcgaccttgcgaatccccacttccgggatggtattgttctcaatccccgagtacaaacctgcggccggagctgccttgattcagcctggaactaggccgctaatgccgacgactccattgccaatgacgcgttataaaacatgatgagtagatactttccctgtcgtcgggcattggccggcttatacaaagtctgggtggtgatgctcagcgctcttctcatcgcctgccaatcaccgcgcgaggctctgcaacaactggctgaggagcaccatcgacaatgggaggtcctgccgggagagcactttcctctcttcatacttgcgccgcacactgcagaaaagatcactcgcctgcgtgtgtacctggaaggcgatggtcattcctgggccacggccactcaacccagcctggatccgagcccgcacaatctgttggtaccacggctggcgatcaatgatccgacaccgaatgcgtacctggcacgcccctgccagttcgtcatggtcgcagcctgcgaatcagcgctctggacccaccgacgattttctcaggaagtggtcacccgcctcagccaggcgctggatcaattaaaacagcgctacggcaacagtgagttcgaactggtcgggtactccggtggtgccgcgctcgcattattgttagcggcacagcgcaatgatgttacccaggtgcaaaccctcgctggcaatctcagtccacgcctgtgggcgacgatgaaaggcctgtcgccactcgacggttcactggatccgctggactatcgtagtcaactcgccttgttgccccagcgtcatctcatcggcgaagcagacctgatcgttccaagtcgtttggcggacaggtatcaacaggcgcttgactcgcccctctccgaattcgttcatgtaccgggagcaagtcatgacagggggtgggaagcgacgtggagccgatgggataaaacaccattgatgcatgagaatcctgaaatcaagggaaaataggtccgcttaaaaacatctgaataccattcccctagcgcgaccataaccaccacctaaaagtttcatttgttgctcaattaccccgtaataccgcgaaaaataacggtaacgtcgcatttattagatttttttcgtcacttatcctttttatgatgaattgtcctacaggcatcgtgtagattcccacgcgcttgaatcagcaattcactgacaagctggcagggatgcctaaaacagacgctgacgcgtgggttgttccctgtcagtttctgccctgtaaggatactgccttgaatatttcccacctgcgccgctctttgttggcgctgtccgtcgcgactgctactgcgacagcatatgccgtacccgcccccgacttgaaccacgacctgagcacaggggcatacagcagctccggtgacgtattcaataacgccaccttcaccgggacatcgcaaaacgcaggtgtagagctgaccaacgtgaccctggcgggcaacctggtcaaccagggcaaaatcaacctgacggctgccacccccaccgacttcccgtccggtatcgccatgaccctcaattccaacgtcggtggcgacttggtaaataatggcgacattacggtgagcggtgacgccgtcgtcgggctggacctgtatctggcaaagatcgctggtgaagtgaacaacaacggcaacatcactgtgacaggcgccaatgccgaaggcatgctgatcacctcgtcccaggcgcgcatcaataactcgggcactatcaccgcacgtggcatcgactctgtgggtatcgacatcgagaacgcacgctttacgggtcagatgacgagtggtatctacaacagcgggactatctccgcagacggggtcggtatccgctttcgcagtctcgacacctccggcggttccgacaccctctccatcaggcagacaggtggcctgatcgaaggcggcagcgcagccattctggcggacgacaatgccccacgttcgtatttctactgggagggtggccaggtcaagggtgacctgctgggcctgagtggtgtgctggtgcgaggggacgcgatgttcgatggctcgaccatccgcgccggttacgtcgatatcggcgatggccgcctgacgctgcttcgcccgcagaccacgattgtgggcggcctcgacctggacagcgccaccgcgcgcctgcgcctgctgctggacaacaacacactgcccaacacgccgatcctgaaagtcactggcaataccttcttctctgcaggcagccagatcgaattgcaggcgcgctctgatgacttccgcacgtcggcccagggcacgcgctacaccttgatcaactctggcacctgggaagacccgcagaacctgtccgtggtttcctcctcggcgctgcttgaggtgaggagcttcggcatcgaaggccaggacgtgaaagcactggttgccacccgcagtgatgaggtaatcacgcaagacctgatgagcgcccgtggttcacgcaacgcggtgagcgccatcaaaccattcaagaacacgctcatgggccaactggacgaaagtgacccggtgttccagcaattcgccaacgccgcctccagcgaagaactggccaaactggccgaaagcctgagcccggacgtcagccgtggcgcgatcaacgcagccaccagcagccagaacctggtcgccagtaccctcaaccgccgcgccagcaaagcgcgtagcggcctgtcctccggtgacgtgctggccggacaaggcgtatggctgcaggcactgtccagcgatgccaaccaggacagccgcaacggtatcgacggctatgatgccaacaccaacggcatcgccgtgggcgccgacggcaagctcaacgccgataccacagtgggcctggcttacagctacctgaccagcgacgtgaaaaccgaccagggcaacaagaccgacgtcaacggccatgcactgaccctgtacggcaactgggcccgtgacaacttctttgtcgacacctcactgatgtacggctggaacgacaacgaatccaaacgctacatcgccggcacccgcgccaaggccgactacgacagtgagattttcggcgtcaacgcgctggcaggctacacattccagctcgacaaacagtggctgctggaaccacaggtcggtgcgcgctatgccaacgtatcgattgattcgtaccgtgaaaaaggcagctcagccgccctcaacgtcggcagccagcgctatgaaatcggcgaaatgggcctgggtgctcgcctggcggccgcttttgacgtaggtgtgggcagctttgaaccggaagccaagctgatggcctggcacgacttcatcggcgacaaggccggcaccacctccaccttcgtgcttggcggtaccccgttcaccaccacaggcgcaacaccggcgcgcgacagctacgagttgggactgggcgccaactaccgcgtgggcgcgtggagcgtgggcgggacgtacaactacctgaccagcagcggtttcgacgccgacaccttcactgcgaacgtgcgttacgacttctgatcaacgtctacgtctgaaatgaaaaaaccggcctaagccggttttttcgtacagcgctgcgggatcactcccactctattattaatagctaagtactgggccttaaaaatgcaggcattaaggccgtgcgcaagggtgaaaccatgaaaaataccatgagcacgattttattcccgagggtccaaactgctggaagctacggatttcaagtcaacgtgagtgttcagctgacgaaacacgacagccagctcatcgccgtcgccacctctacggacatccgcgattaattcaatcacatacgacggatctctctgaaaaagctctgccattgcctcatcgtgactgcgatctttcatcacctacctccgcattgagcgcgagcaagccaaatgctcatttgatccttgttgattttcttagcatgtttgctctgtctaaacggctcgcagacattgcattttaagcccgctatcacagcgagaggcatgcgccactagcggtagaccaatgtcaacgggcccccttggcctgcatagctttaccatcacagcccccctgggaacgatgctgccacagaaacctctggcatttcagcttcttaaatggtgccaaattgatatgatcaaactctgatcggtctctcgatgaatgtggccgatgagatccaaactgatgatgcagtcgacctgaattctacggataggagtcgcccatgttgaaccacgaagccaaacgaataatcgatgcggaaataatcccgaaaatggagaccgggaacctaactctgttcttgggtgcagagacattcgctggcacgccatccctaaatggcaaaggagttccgtccaccgacgagcttataaagcgaatttttgagtcggcaggatatcctccagaggaagccctgctaaccgactttcctactgcttttggtgcgggccaggacgacatcgacgactttgataattttttaacatcaaactattcggttagctcagtacatacttggcagacggacatattcaaactatggtggaaaacaattttcaccacgaatattgacaatatagcaaacgaagcattagctcaaaacaagagatcaggacttagctatcccgattataaaatatacaattactcagatagtgaacctgttcatgcgatacccacctcaccgccaatcgtatatctgcatggtacagtaaccaacatttcagccggtgtaatgatcgacggaattagctacggaatcacctcttccaaacaaagcgaatggctgaccaagtgcgcattgaacatcgaatatggcaactgtctatttatcggttcaaaattcaaagggtcagctatagatagcgccatacgatcaaagagtgccgcagacagttttaacagcagggaaccaagctgggtagttggagaaagctttacacaaatagaaaaaagccactacctacgaaaaggaataacgcccctagtagctgatgctggcgattttttttcgtacttgaaatctcaaataagccacgtatccccagaaaagttcttaaaacgtaaagccccttacctagcaggcaatgcaaaccgctccatcggatggttttccgagaatttcgaacacattcctacaaagttagccttagctggcgaagaaagtggtccatactcacgattttacatgggcgacttaccagaatggttctacgtgtcgcatcatgttccggcagtactcccagcacacagagccatcgtttccgaggttaatgcttttttaaatagtgactcaaaatgccgacttatcgctgttacaggaccattaggatcggggaaaacaaccgcatgcatgatggcagcagccgagatctcggtcaaccatcttaacgtgcatcactttaacggtctaaacggtatagaaattgagcatctctggaacactattaaagacacccgcggcctattctgtttagtaatagatgcagcatatgaacatttctacgctgtaaacgccgtttttgaaaggataatggatagagcaacctcttgtagattatgcgttattatagaagaacgaactcgtcaatatgaaagaaacaaacatcactttatgtcaagccaacttgacaatattcgccaaatcaaagtagaaaatcttaatttagcaagtgccaccaaactttatgacaaatcgttcgagttgggcataagattcgaaaaattaataggcaaaacaagaaaaaattcaatcaaagaaattattgattttgacaaagggtataaaggggatctccttgcaactttgtacgatttatcatcacgcaagtcataccgagaaaaactggcagaagagtatcgagaaattgacacccaggaagcccgcgaagtttaccaaacagtagcattggtgactgccgcgcgcctgccactaccgctaaacttcattgctgagactcataacatatcagtatcaaatttagatcgaataatttcagatggtttgagagataaaattcatactcacggcgtagctcgtggcgtctctgcgcgacatcattcgatcgcagaatatcatctcgcttataacattccgcaagaagacatcaaaactcgtcttattaacttgatgatatgcctcgcaccaaagtttacaattgaagacataaaacatcaccctttgagttacaaaatatatcgatccacactctccttccactatttgacggagaccctattcagagggagaaagaattattcatacatacatgaaatttattcgaaatgccaaaatctgtttgcaagcgacggcgtattttggcttcaatatggtcgttttctagaaaaagatgctgatatagaaggggcaatccactgctttagaaaaggtttgggactttatgactcatttcaagttcgccatgctctagggcaaactctgttaaaaaaatatatcaagaatgattattcagaacgtgagctgtacgaggaagggactgccatactcctacgggagatcgaaatgcgcgggcaccacgatgtataccccttcacttcgctagggcagtgcttaattcagattgtcgaaagcaacccttcggacgaagattccttgaacatgttaaaaactgtagtaaataggggcataaaacatcaccaggccgacagtgtttttatggatattttgaagcgatacctcaggttcaacccagacatgacaaacaactaatcgcctccccaaagagcaactgcaagcaaattagttgctcttttaaaactaaaaatcgtctatttatattagattacattgacacggaaagcatcatgattcttgctcatatattcatagcagagcataaagcgttacgtagaatcaacgtcccacttaacggcagctttcgctgcaacttccacaatagcatcttgcatcttagcaaaccgaaaaataccgctgaatattatcatgatcggtattgctcagctctgattggtcccaatggagttggaaaaagtagtgttctcgatatattggaaacattaaacggcaccagcgactctagtgccttgataattttctttgacgaaaccgaagaaaaatatcacatctgcccaatcaacatctccccaaaggagatcaaagaaacaacttgcgacaaagaattcgtatttgtcacaaacagtgcccaattcttatcagaccacaacataaactttgttaaaataaattcaatatcttcgagtgaagatacactaaacttcaaaaaaaccaaacactccccaaacattcacaatctcaccatatatgaaaatgtcaaaaataacgcaaggcaacgtaaatactttgaaaaactgttggcatacttcagagactccttcaacagagaagagttcatggaagagattgttttcgaattcgttttctctagctcgcctattactattgccaaacgaagtatggagacgatagcttcagaaaaagaatatatagaaaaatggataacttacgaacctcaattcgagttatcagacagcgaaatctcacacggcgcagtatttcaaaaactaattgaacttaacttcctatcaatatcaagtgctctagccaaagcttcgaacgccgaagaaaagactcttccgagcatactctttcagtttgacaaaacgtatcatgtaagccctatcggaatgagcacttctaataggctccgaaaagctatcaaagatttagagattgcagattggcccgattttgtacagaactcaattaatcaaggagaaagtgaagaaccattctccaaagatcagattaattttggaaacctccaagctttacttgagaactacctagagattttcgaagaaatagcaacaattctattcgactattgctatgacggcgaaaaacttaacctcaagagtgtaaagacagactattacgatgctgtgcaggatttgaccggtgcgattaaccgtctgccttcgaatattgccaacaacatatcctggggttggcgtggtattagtagtggcgaactagctagaacccacattttctccgaaagctatcactacctaaaatcaagcgattcaaaatctaacaccattttcgtctttgatgaagcagatctgtacttgcatccagaatggcaacgtacatttatccaggaaatgcttgatcacctgagattaatagaagccagccgagatattaaaacctcgcagattgtcatttgtacgcactccccaataattatcagtgatttcctgcctgacgacatagcttcattaacaaaaaatgaagatggcgatatagtagtgacaaactcatatggattcggcaacagtatcgtagatatatatataaaggggatgcatttaacctctacttttggagagcatgcacgtcgcaaaatcgagtatcttcttagaaaagcagaacaaagtacactcacctctgatgatagagaattgatctctaatataccaaatcctaacacaagaaattttcttttaaatcatgataaagatcaataaggctttctcatccgacttcaaggaaacatacgttcagtatgctttgaacgtagttctttggcccaacatttcaaagctcgttgaaactatccctcacattcataggaaactagctaagcaaacattcgataagcgctttcttgaggttttgctaagaagcgaacccgcgtcattcgaggacatcattcaaaggctgtacacgctattcccctatatagctgagagatattgctacagctacctactaaaagaaattgatatcgcaacaaatattatcaacatggcaacagactctccctccgacaggagtgagtttgacaaacttgtaaaacgaacaatccaacaattaaaaaggttaacctcaagatatagactatatcttaccccattcataatcgccgagcttgaatcaagcattcctcgatacaaaaaaaagaaatacttgtgtagattagagaatgcttgccgcggaaactctcagataactgagcgtgaccgagcacttttccctgcttgggtcaaccaacttcccagctgtttcgattatgatgcggtctcacaagaacttggtcaagccatcacagaacagttagaaattacggtttgcccatattgcggcctggagtcaatacaaacatacagctccatatctgtccgaccagacttggaccatttttatccaagaacccgcttcccctttctcgccatatcactttataacctaatccccgcaggctctatttgcaatcaaaaacttaagagaaacaattcaatgttgggacatatgcatcctcacattgaaggcttagataacgatccaatgtttcggtttggcttccttccggacggagatatacgcagcactttctgtctagacatcctccagcaaaatagcaatgccaaaaataataacttaaagcttttcaagataaaagggatatacaatgggaatgaagatcttcgagaatggtactgttgcacttacgagcttcgcgagttccttaaacaagaaggagaggagctgagtaatattgatttcatgtcgccgctttataaaagcgtaatcgacatacgaagacctaatacaaaagtttccgctcaaaaattcaaaatcgaagccctgaatgaactttttcaccaaacgttatgcatcgttgaccagccgatactatgagagggataatttgcacatatttagtagttaacaatacgcattacatactcgaaatcagatacgcgcattaaccataatctccactatattcatttttactgccaagccgatacaatctagaacttgtatcggcttggcttttatattaaaaatataaagtgaacgacggaatagctccccacaattctcctctgttaatatcgacctccccccagtcatctttctcggtgtctaggacagagcaataagtcctagcctaacgaacggtcgcaacgatatagcgcaccaatcgggtggggctgtgtgttcctttacctctcggaccccgtttggcgatcatttgacaacccgcgacataattgcgaggacttcggtctgcaacttccgaaagtcgtccatcatcgcttcaacgtctgtcggcctggcaccttggccgcgcttctctacgagccagagtttcagcagaccggcgacccgtccgaggtcgccgtttaccttagccaaatcggccacggcggtcaggtcaacaacagaccgtattggcgagttcatcccaagggcgcgaaggtagcctgaacgggacattccagcctcgatagcacgctcagtaatcgcctccttttcctcatcagtaacccaaacctcgattggcttgccacgccgccgagcgggtgctttttctttcgtgcctgatggcatgatcgctcctgttgctgctgtgttttcgctctcagacgcggcagcggctgtgggctttgcagagcaaaatccgttgagccgaaggcgaataagggtaggtgttgggagggggcgggcttgcccgtacccgtacaacacacatcttgccgtctgatcttctgcaattctaggcaacttgcccgcctcaggttcgccttgctgccatttccggttatttctgacctataattgccctgaatttctctgagttgcgttaaatttcgctatgaagataaaaaatttactttaattttctaaaatttcctttagttgcctatatcaggtgccgagcagtagttcgatcacataatcaggagacgccaaatgacagacgggccgaaaaaggtgtatcgcggcgcagggcgagttgcctttctggccaggcttgatgactttcgtaagctgatagacgcagggcatccgctacgtgcgatctatgacgattacgccgaacagcttggcattggctacccgcagttcaccaaatacgtctgcaggtatgtacgaaaggaaaaagacgatgggcaccaaaggaaaggctctgggcaattgacatcgcaaagcctctcaccagccccgacaggagtcgtaagaggacagccggagcacagcgccacaccgccttccaaacccggctcaaaacgtgcgggattcgaccacaacccaaatagtggaaacactcgggacgacctgatctgacgctccacgaaacagcgaggccgtgtagcccctttaatctgggagcgaaaatgaggtagaacttttcagtctgtataaatttacctcattaaaaacggtgaacccatggctcgaaaaactctcgcagaacgccgttctgacgccctttcagagctggaaacagctaaagcaagattggcgaaattggataatgaggcggctgaaagaattggaagaattgcaatcaaatcaggattggttaatcttgaaattacagacgatcagattcgggaagaattcgacaatattgtagaaaggatcaggaagggggattgattatgaaaactgctcaccgcatcagcgcattggccaaccaactcaacgaactgcaagcctacctcggtcaagccagcgggcgacctagtaaagccgttagagaagcccaatgcattgcggcagagttggcttcctcgctcgaaaactggcacctagaaacactacacatccctgaaacggagcgtggtcactatcggacccagaccccctattactcagcccactaatgcgctacgccatttcatcaaaagcccacttcggtgggttttttttggccgtaaaaacacatcacgctggaaagacagacaggtccaagcataaagaaaatgccagaaaaattaggttgctacgtgtcaatcccacccaaccatagcccgtaacccattgatttctatgcggatagatacttatccgcatattccaaaccacaccaaatttgtcaataatcaaacctcgaaccatgacaaaacgaggtgttcggcatgaatacggaattgctgaaatcgccgatttcatcggctcggaaatcgagaatacgaactgcccttgttttagcaatgaaaagcacaagtcttagtgtgggcctttacttggccccctcacctgcgtatgccatctactgctcaaactgctcgacgttctatcaacagatgtttgagtacgccgaggcagtcaacacagcgttaaacactgccgagcaactacagacgcagattcagcagtatcagaacatggtcacccagggcacgggcttgccaagcaccatgtttggcagcatcgcggccgaccttaaaaacgtggccaacatttacacccgttcgcagtccctaggccgccagatccaaaatatggactctcagttcaacaccgctttcccaggcttcgagtcctacctgaatcaagcagcgaactcagcaggagttcctgcgcgggatcgatatcagaagtggtcggaacaaggcagcgacaacataaagacggcacttgaggcggcaaacctcaataccagcacgttcgagtctgaagacgtccagcttgatcgcatggtggcccgttcgcagtcagccgtaggccgcatgcaagctatacaggcaggcaacgaaatcgcctcgcagaacgtgcagcaacttcagaaactgcgcgatctgatggccacccaaatcaacatgcagggcaactacattgcccagcaaggcgaccggaaggccgctagcgaagcagttgaacagcagttcgaagcgcgcaaaaacatgcgcggcggcgtgaaggagtactgagagtgactatttcgagatggctcatcgtgttgatgtgcgccgggtccgctttggccggttccctggtcaccgtggtagttcaaagcaacagcaaatttaatgccgtggctgagcaacaacggcagcagcgtgacgctgatgtctcatttgaggcgcgcccgaacactcgcggcggcgtgaaggggtactagcgatggatcgtcgtctgttgttgctcctcgccttggctggtgtgttcgtgggcggagatgctgtggccgcaaccgacctttcccatgccgatacatcgattcagggtctactcgacctcgttttgcaacagtcgcaccagtggtcagggaagctgtatgactatgcgatcagactgttctggctgctggcctcgatccagttcatctggacgttcatgcctctggtcatgaagcaagccgatttcggcgagattgtcggcgagctgctgcgcttcattctggtgatcggtttcttccttgcagtcatgaagtactcggtggaatggtcgacggccattgtcgatagcttccgcgatgcggcggcatcggcgagcggcctcgggcgtgcattagaacccggcgatatgctggcagttgcgctggattttggccgcaccatggtggagggcatttcagtgttttctccagccaagggacttctgatcgctgtatgcgcaatccttgtgttggcatgcttcgccttcatcgctgcattcatgtttgtcacgctcgtagagtcttacgtcatcatcaatgcttccgtgctgttcttcggctttggcggttcgcaatggacgcgggattttgcaattgcgccaatgcgcttcaccgttgcgattggcgccaagctatttgtactaaccctgattgtcggcctgatcgtacagtcggcaaaacagtggttggccgcctacgccaatgacgaagcgtcattgatgacgatggtcggtttggccttagtgtgctgttacctcacgaagacaattcctgacctgatcggtggcatgattagcgggacgtcaatgggcggcggctcggccattggtgggatggctgtggccggtgctgccggggcggcggctgcggcggccaccatcgccacagccggggcggcggctcctgccgctgccctcggtgctgccggtactggtagcgcagccggggccggggcggcgggtgtcggtggactcggcggcggtctggcgggggcgattaactccagctttgccggtgccagctccgcaggtggtgccgcgtcgtctatgggttcagcggcgtcctccggcgtgggtgccagcaccggcggcgcagcggccaagggtgccagttccgcaggcgcgaaggtcggcggcagctctaccaattctcccgggcaggcgtcggccgcgccgtcctctccaagcagcggcctacagcaggccgccaagcaggccggaaagaccgcgcagggcaacgacgacaaagaccagcagacgacacccaaagggggagttgtcagctccggcagcgcactttcccaagcggccgacggtggcgcaaagatgctcggcgtgatggcctcaatggcagtgccaggtatggagaatgcgcacgccttgtctcttggtgcaggatctcccccaccagttcccgacgataccaactcgaccactccagccaatggagcagaatcggccacggaagcttcacacgctgagcctaacgtcatccgtccggcctcggacactaactctgctcccggccgcctcgcctcgctcaaggtgccgggaatgacctcgaacgatcaaccggagaaataaccatgatgggctttctgatgttcgctggattcgtagtattcgcctttacgttcgccatcggcatgtgggcactcggccggtggctacgaagcaaaggttacgggccacagctagataagctggatcggcagtacacggcattgcagcttcgagtaagcccgctggcattgtcggcttcctatcgcatgtttgccggggcgcataccctgaatcgtttgcctctgctgggcagtaagagtagcggcgttctgaaccagcagatgttgatggccatccaagccgcgcaggaagcggagagggaagaaaagcgcggcaagcgctaatcgctgatcgctgagcagccccacactaccccgcctcagtgcggggtttcgctttccacacgcagcggctaagtatgcccaatttggaagaatcaggagacactttcaccagcatcacagatgcggtcaaatgccgggaagctccgccctcagtaatacgcacgtacttgtctcagccctatttattacacctcgctatgggttatacgctgcgttatggtcgatgtttgggacaccggccccctgatcatacatgagcttccgaggcgttttctgaggggttctgacaagcgtaagagatgattcggctaccgcccctttccttcgggtctcaattcaaagaccgcaggaggcacgacgcgccagtctcttgaagatgcataagttcgatgaagcaatcagccctttctttttggtgccaaacgggccgaaggccgactggcaaggccggaccgcgcctcaagcgcgggctgcgccgcgcaggtactgaatatcctgaagatcctgctaaccccgggcggatgtggcacgtttcgggcgggtgtgacgcgttaccgggcgggtgtgacacgccatcgggcgggtatggcacgcttcacctgctaaaagcactgcttttcttgatgcgatcaccatcaagcacaagtccaattatcctcagatcttccgcttcctccttaagccttcgtcgcgcattgcgcatgtcctgacttgaggcttttccggctactgccacgataacggtgtctagataccaaccgcctgtcggcactactttgtggctcaaaacgtgccgagctaccgcttggcttatgccgtgctggaggcgcgcaatgggggccgggtcatagtagagactcagatcatgctcaaggagcattaccagcgcaattccgagacgcacccgccataggtttcgggctccccctgtcagaggatcaggacgtgtcatgggcgaaggtataacgtggtcaatcaatccgccgatgattggaaaatcaaattgcggcgtttcaatcgttatcgttgcggctctcagttcggccagcagcttttcgatctgtgtgaagctgtagcggctatcggaaagtgtctttctcacacgcgcgggatctaccagaagttctacgccaccatctgagacagaccgtcgacgttctgcgcagtacagtacagcttccagtatgtccgcgtgcctctgccctagtctgcctgtcacgcggcagcgcccaaatgatgtttctgcccaattaccctcgcgcagttgcgggcgctggctaggctgataaagcatcactctggcctgtgcgatagaactggtgggaaccacggcgttaccaccgctcatcgtcacttccgtttacgacttgcagcgggctacctttcttcatttccgccaactcaaccggcacaagaacgccgccttcctggcgctggtaccattggtcgagcggggtggcatcgtagttctgcttgctaacaccgaaacgaacaaaaaaacctcttcggtcgttaccgatgggctggcgatcataggcgcgatcgctgagaattttggcctgctcctccgtcatctttgcgacaaagccgcaccagcgggcgttgtcgattagagcggatgcgcctcgtgctgcctgttgctgatcggtttgcccctcgcgggcgctgcccttgctgacatggtgcaggtacaagactgatgccccagtattggtcgcgacgtgctcaagcgtggcgactagccgtgacatgtcgccgttgctgttctcgtctcggtcgtgaattcggcttagggtatccagcactatcaaccgggcaccttcgcaaaactctgtgatacgagcaagatgccgatcatccatgacgttcagtcgtttacccatgatcgactcaagaacgaggttcttcgcgatggactcgcgtgcctgctgatttaagtgctggcctatggcatggatgcggcgcaccaatgcgacttccgggtcttctccggcgaaatacaccactcggccagcgcatgagggggcaagccctacaagatcaccgccggcaacgctgcatgcgatagccatcgccgcttccaacgcccagaagcttttccctgtagctccgggagctaccaatgctcccactgtgccagcgaggaagccgggccatatgaagtccagtgtgggcggttcgttctcgaatgctgcccgtaagtcaatcgccacaactcaagctcccattccgggacgcgtggccgggccggattgcctgcacgtatcaatccatgtctcgacctcttccaaatcccaaacgaccttccggctgctaacggcaatacgacgagggaatttcccctgcttttcgaagttataaatcgtccgctcacacaaggggatcattgccagcaattgctttttgctgatgagcactttgctcgacttcctcgattctttttccacaccgaactcctcgttttgtcgcatttgaggttcgattattgccccatatttccagagcattccacagatatttatggatttattccctttaaaatcagcatcttactgtcctgcaaacgtatagtttcgggacaaaaaaacaacgcgatgtcgttgttctttcacaagtttttttcgtcaaagccgtcaggaaaaatgtgtcccacaaacgggtagtttccggacagaaaaaaacccacaaatgtgggtttcttgatagaacaaaatagatcagcgctcgcttatcccattaccaaaaacgaaatcaactttctgagcgcgtttttttgcgcgtccattcatcaatcatatccgcccaatcttgcaacatcgcccgacgctgatcacggtattcagccttgttgtaaacggcccgtacccccttctgctcgtgcgcaaggcacttctcaatccagtctgagttgtaacctgcctcatgcagcagcgtgctcgctgtgcgcctcaaatcatgcggtccgaacttgctcagcggctgcccttctttctgcgcaagccggtacgtgagcgtcagcacctgattgatcgtcgcggtgctcattggcaaatcagaatcgtaccgggagggaaagacgtagtctgaaccgccagcaaacgtcttcaacgcaatgaagaaatccaaagcctgctgagataagaacaccaaatgaggattacggcgcttcatccgctctttcggaatgatccacaaggcttcgctgaaattgatctcgttccaggtagcgttggtcaactcacttttgcggaccatggtcagcaataacagcttagcggccaccctaacggaggaggcggtgccgatacggtccaggtactgatacatcaacgcgatttcgtcaggccccaaagcacggtcacgtggctcgaatttagcgatgcttgcaggacgaaccagatcagccggattctcgaccttctggccacgctctatcgcccatcggaatacctgcatcacaatctcgcgggagtgaacggccgtggcgggagctccacgctccacaattgcatcagtcagcgttcgcagatcctcatgattaatttccaccagtttctgattaccgaagtgcggctttagctcgcgctcgtaaaccgatcggcgcatgtcacgcgtcgagtcagccatctgatacccacgcagccatttctcagcccacgcatcaaacgtctctgcccctttggtgcgtgccttggcacgggctttctctttggcaggtgacttacccgccgaaaccatctttttagcctcgcccaggcgctctcttgcttccgcaagtgtgatgccacccacgccataacgaccgaacgtgatggtctcctgacggccattgattgagtagttgtaacgaaatgagatggaaccggcagcagtgacggccacgtacagcccgtcacggtcgttcactttgtagagtttttcttgcggcttgaggttacgcagcttggtatcggtcagcatggcagttacggattccatggaaaaaataccatgctcagagaagcactcatacaccgcgataaaacccaatggaaccgggctgatgatgagatttgataccatgcccttccctactagggcgacatggtatcgagcaccgaacatggcatttggctcagtcaatgccccgtaccatgccatacaaacacggtgcttggcgatgcacaaagctgccagaacttgccagacccaaaaagccaaaagcccgcaattacgcgggctccagggcacttcttgctagatggtgccggacaatgccggacgtccaatcattcccactcaatcgtcgccggcggcttgctcgacacgtcatacgtcacgcgcgaaatgccttcgatctcattgatgatacgaccgctgacagtctccagcagctcgtacggcaggtgtgcccagcgggcggtcatgaagtcgatggtttctaccgcacgcagggccacaacccacgcgtagcgacggccatcgcctaccacacccacggatttcaccggctggaacaccacgaacgcctggctgaccttgtggtaccagtcggccttgcgcagttcttcgatgaagatgtggtcggcgcgacgcagcaggtcggcgtattccttcttcacttcaccgaggatgcgcacgcccaggcccgggcccgggaaggggtggcggtagaccatgtcgtacggcaggcccagttccaggcccagacggcggacttcgtccttgaacagttcgcgcagcggttcgaccagcttgaggttcatttcctcaggcaggccacccacgttgtggtgggacttgatcacgtgggccttgccgctcttggcgccggccgactcgatcacgtcggggtagatggtgccctgggcgaggtacttgatgttgtccagtttgttggactgggcatcgaacacgtcgatgaaggtgcggccgatgatcttgcgcttcttctccgggtcggactcgccggccaggttgttcaagaactgatcttcagcgttggcgcggattaccttgacgcccatgttctcggcgaacatggccatcacctgctcaccttcgtgcaggcgcagcaggccgttgtcgacgaacacgcaggtcagttggtcgccgatggctttgtgcaacagggcggcgaccacggaggagtcaacaccgccggacaggccaagcaatacgttgtcggtgccgacctgggcgcgcacctgggcgatggcgtcttcagcgattttcgaaggggtccacagggcttcacactcgcagatgtcgaggatgaagcgcgacaggatgcgcccgccttgcttggtgtgggtcacttccgggtggaactgcacgccatagtaacgacgctcatcgctgaacataccggcgatcgggcagctcggggtgctggccaggatgtggaagtcctgcggcatcttggtgaccttgtcaccgtggctcatccacacgtcgaggccgaacaggccgtcggcgtcgacgtggtcttcgatgccgtccagcaggcggctcttgccgaccacatcgacacgggcataaccgaattcacgcagctcggaaccttcgaccttgccgcccagttgttcggccatggtctgcatgccgtagcagatgccgaagaccggtacgcccaggtcgaacacggcttgcgggcaacgcgggctgttggcttcgtgcacggactcggggccaccggcgaggatgacgcctttcggtgcgaattcgcggatcgcttcgtcgtccatgtcgaacggatgcagttcgcagtacacgccgatttcgcgcacgcggcgggcgatcagctgggtgtactgggaaccgaaatcgaggatcaggatgcggtgggcgtgaatgtcgagggccatgaagtcagtctcgtctaatgaatcagaaacaactcggggctgaagaacagccccggttacttaacattttgctggaagcatcaacctacacggtagtttggcgcttccttggtgatctgcacgtcgtggacatgggattcagccatgccggcgccggtgatccgtacgaactctggcttggtgcgcatttcttcgatgtcggcgctgccggtgtagcccatcgaggaacgcaggccgcccatcagttgatggatgatcgcgctcagggtgcctttgtacggcacgcggccttcgatgccttccggaacgagcttctcggcacctgccgaggagtcctggaagtagcggtcagaagagccttgcgcctgggacatggcgcccagcgaacccatgccacggtaagccttgtaggaacgaccctggaacagttcgatctcgcctggcgcttcttcagtaccggcaaacatcgagcccatcatcacgcaggaagcaccggccacgatggccttggacaggtcaccggagaaacggatgccgccgtcggcgatcaacggtacgccggtgccttcaagggctgcggcgacgttggcgatggcgctgatttgcggcacgccgacaccggcaacgatacgggtggtgcagatcgagcccgggccgataccgaccttgaccgcatccgcgcccgcttcggcgagggccttggcggcagcgccggtggcgatgttgccgccgatcacctgtacgtcagggaagttctgcttgacccaacgcacgcggtcgatcacgcctttggagtgaccgtgggcagtgtcgaccaccaccacgtcaacaccggcagcgaccagggccgaaacgcggtcgccggtgtctttaccggtaccgaccgcagcgcccacgcgcagacgaccttggtcatccttgctggccagcgggtaagccttggctttttcgatgtcgttgacggtcatcatgcctttgagggcgaatttctcgtcgacgatcagcacgcgctcgatgcggtgcttgtgcagcagttcgcgcacatcgttcttgtcggcgccttccttgaccgtgaccagacgctctttaggcgtcatcacttcacggacggtgacttcaagacggttctcgaaacgcacgtcacgggaagtgacgatgccgaccaggtcgccatcgtgcagtaccggaacgccggagatgttgtgcaggcgggtcaggtcgaacaggtcgcgcacggtggcgtcggcttcgatggtgattggatctttcaccacaccggcttcgtaacgcttgaccttgcgcacttcggcagcttgctgctcgatggtcatgttcttgtggatgatgccgatgccgccttcctgggccatggcgatggccagacgggcttcggtgacggtgtccatggcagcggaaaccagaggaatattcagctcgatgccacgggttaggcgggtcttgagactgacttcgttaggaagcacctcggaataaccgggcacgaggagaatgtcgtcgaatgtcagagcttcttggctgatacgcagcatcgcgggggctcccgagcgggaaaatggaagcgcgccattatatacatgcaccctgtcgggctcaatgtaaaactctgacaaacttggtaatactgatagatgggtaatttaactgtcccgatcgttcccacgctccgcgtgggaacgatcggatcaggagggttacaactcgactttgacccaactcatcttctggtccagccaatcggcgaattcgtcgataaaactctgcttgaaccccgcttccgcccagttgttgaagatgaatcccaggttggaaaacccgcattcctgcaggaacaggaacccgttgatgtcgtcttcatgcccacacagcgggcaggtgaagttgtcggtgtggccgggcatccagtcttccaggctttcgaacagcgcttcgccgacttccttgcggcattccgggcaaccggcttcttcgagaaagcccttggccggcgtgtagatgcagcgcttgtagatgatctccaggccattgatcggctcgttgaacggcagtgcctcggggtaaagcaccacggcacgggcgccatcggccagggcgtagcccatgcggttgccggtgcggccacaggtggtcagctcttccttgatgatgttcttgcgcaccagccagcgcacgatcgcccgggcgcggggttcgtggacgggcaaggtggagattttcgggacaaggatgctttgggaattcatgggagtcctgcggtgtggccacttgcccccgaagaggccctgaaggcaggcagcttaatccctgaaaagaacaggtcaagtactcaaataccgcccgatcaatgcaataccgctggtcagcaccagccaggtcaccagccgcacaaacgcctcacgcgacatgcgcatcgtcaacctgcgcccacaccacagccccaacgccatcgccggcaacaggcacagtgccaacatcaacaacggtaaatcagcatacaccccggcgatcaggaacagactgaggcgcaccaccgtgctgcaactgatcaacgcactctgggtggcgcgcgccgcgtctttggacaggcgactgttgaggtagatcgcatataagaagccaccactgccgaacagcgccccgaacaacccacccaccgtgcccatcggtatcgaccaccccgccgccagttgcgtcggccgcgccttcaccgccaggctgtagagcgcgtaggcgctgataaacaggcccatcaacaacagcagcaggtccgaatgcaagttgagcaaaaacaccacgccgagtgtgcagccaaccgccatgcacggcagcaatcgcagcaactccggcttgttcacctcgcgccgcgattgcagcaggttgccaaatgccgcgacaaaatccagcagcaccagcaaagggatgatctttgacagtggcataaacacgatcagaatcggccccgcgaccagcgccgtaccgaagccagcgataccgaacacgatataggccacgacgatgcccaggccgatcaccagccaatccacagcgccaaacgaccactgactcatcagctcaaccgggctcatggggtattccttgtacgagatgatcatcactttagccatcggtgagagatgcgactaatatcttcaaagcccgccacctatctcgaaaaggcatgacgcgtgatatcaacccgccaactgcgttacttcgtcgaaatcgccgactgcggcagcttcagtgccgccgccgaacgcctgtttgtggcgcagtcagccttgagccgacagatcaaggagctggaaacccagctgcaaaccccgctgttcgaacgcaccgcacgccaaccgaggcttacggcggcgggcgaagccttctatccgcgagcccgcaacctgctgagtgaactgctcaaggccagccaaatggcgacacaagtgggcaatggcgaactgggcacgctacgcctgagccattcgagcactgtgccgatgagcggccctttgctgcagggcatcagcgcttggctggaacgctgccctggggtgtcgatggacatcgtcaaactgtcctccgaagcgcagttggaagaaatcgccgaaggtcgccttgaggtcggcgtgctgcgctcgccggtgctgcgccagcgcgagggggttcgggtgatgcctttgtatagcgagcaactgctgctggccgtaccgcccaaccatgcgttagcgcgtagtcaggcgcccatcgagctagggcaattgaaggacgaagcgtttatttcaataccccacccccagcgcggcggcctgagttatctatcagccgagctatgcatgcgtgccggatttttccccaaggccgcgcgcgtgatgtcgcgcaagaccacccagttgcaattgatccaggccggcttcggtattgccttgttaccaaaatccatgcaggacatcgcccccgccaacgtgcactttttacccctggccgacccggactgcctcagcaccgtggccctggcctgcgcacaggcgccgagcgcgctggtggagcaattctgtcaaaccttgcacgaatgcctataaactgccgcccatgattaaagatccttttgctcgtttaggcctggaccgcgaagtcctgactgtcagccagctcaacggccgtgcgcgggtgttgctggaagacgtgttcaccaatatctgggtcgaaggcgagatctccaacctcgcccgcccggcctccgggcatgtgtatttcacgctcaaggacagcggcgcccaggtgcgttgcgcgttgttccgcaacaacgctgcgcgggtgcgccaggcgctgaaggatggcctggcggtgaaagtgcgcggcaaggtctcgctgttcgagggccggggtgattaccaattgatcctcgatacggtggagccggccggtgatggggcgttgcgcctggcgttcgatgcgctgaaggaaaagctcagcgccgaaggcctgttcagtgccgaacgcaaagtgccgctgccggcgcatcctcgacgcatcggcattatcagctcgccgacaggcgcggtgatccgcgacatcatcagtgtgttccgtcgccgtgcgcccaacattgaactgaccctgatccccaccgccgtgcaaggccgcgaagcgatcccgcagattgtgcgcgcgctgaaactcgccgatgcccgtggcttcgatgcgctgatcctggcccgtggcggcggctcgctggaagacctctggtgtttcaacgaagaagccgtggcccgtgcggtggacgcctgcgtcacgccgatcgtcagcgccgtcggccacgagaccgatgtgtcgatcagcgacttcgtggcggacgtgcgcgcccccaccccttccgccgcagccgaattgctcgcgccagacgccagccacctggtgcgccaggttgaaaacctgcaccgccgcctggtgctgctgatgcgcaaccgcctgagccacgaccgcctgcgcctggaaggcatggcccgacgcctgcgtcaccctggtgaacgtctgcgccagcaagcccagcgcctggacgacctggacatgcgcctgcgccgtgccttcgagcgcagcctcaatacccgccgtgaacgcctgatccgcctggaaacgcgccttgccggccagcacccgggccgccagttggccctgttgcgccaacgcctggacagtctcgccgaacgcctgccccgcgccatgcgcgaaggcctcaaggcacggcgcctgcaactgcaaagccagatgcagacgctgcacgtggtcagcccgctggcgaccctgggtcgtggctacagcatcctcttggatgaacgcggccaggccattcgcaatgccgcgcagacccacaccggccagcgcctgaccgcgcgcctcggtgagggccaattgcaggtgcgggtggaagacaaccacctgacacccgtcaccctttcgttattggattgattgatgccacgtctctttagtgtgttgatgctgctgtgccttgcctttaacgcacaggccgacagctacattacccgaaccctcaacaagcccgtgcctggcggggttgccgtggtcgaacttggcccttccgctgccgcacccaaagccacgtacctgggcaagccggtactggtggtgaaagaagcggacacctggctggcgattgtcggtattccgttgacggtcaagcctggcaatgagcgcatcagcagcggcggacgcaacctgccgtttatcgtcggctacaaaaagtacccggaacaacgcatcaccctgaaaaacaaaagccaggtaaaccctgacccggcgcagctcaaacgcatcgaaggcgaattggcggtgcagctcaaggcctaccgcagtttcagccctaacctgccgagcaacctggtgctggacaaaccggtgaacgggccgctgtcgagcaagttcggtgtgcggcgcttcttcaacggtgaagaacgcaatcctcattcgggcctggactttgcggtgccggccggtacgccgatcaagacgccagccaacggcaaggtgatcctggtgggcaactacttcttcaacggcaacacggtgttcgtcgaccacggccagggctttatcagcatgttctgccacatgtcgaaaatcgatgtaaaagtgggcgatcaactcacgcgcggcgcggtggtgggcaaggtcggttcgactggccgtgcgaccgggccacatatgcattggaatatcagcctgaatgatgcgcgcgttgatccagcgatctttatcggcgcatttcaaccctgaaccccgggcatcggccggcaccattcggtgccgtcgccggagcttttcttaccgatgcaacaggaaccaaaccatgctgaacacccacccattcgacgacttacaaggagcgtaaacgacactcaacctaccctgtgagacactccctatgtttgctaccgcgcaagcccttatgtcagttgcttctcggcagaccaccacgctacgtcagaccactccgcccgcaaccgacaaccgcccacctacttccagctctcccactgcccacctgaccttcgcgccagacttcccccccctccccagctcatcaggcatccccccagccacacctagcccacttgcaaagcactttaacgtcagtgaccagcaggcctttctggatcaacacgacagcctcaccctcgagatgcaacgcctacacaatcagcaacccaccttcaaggcattcctgcaaagcgaactggaaaaagcgtttccagacgtcaggccgctcaacgccgaaacgctctcgttcaaccgttaccgcagagacggcgatcacgaaacactggcctcttccgagcccttgatgaccgccctcgcccgaatgatgcaagagatccaggccaatccgaatcggctgagatcggctgagcgcaacatccgcacggagttcattacccaacaaactgccaatgacagtgccacgccagccattacctcaggctccttgcaatccatcgccagagcgatcgtcacgcagtaccccgcaacgctgcaggcattctggacgacacctcgcccaggcacgacacccccgcagacgccccaggaccacctgctggccttgcacaaacaacaactatcgaccctcgccgcactgcgcgcagcagacggcacgctaagcccggccagcaagacgctgatcgacaacgcactgcaataccccaccctggccgagcgggaaaaagccttcgccgatggcgcgcgcccaggtgtgtatccgctcactctcgacgacggcaccgagcgcggcgcactgctggcgggcacctttctgatcacacagaccgatgggtcctttgcctcaccacccacctggcccaaaggaaaatccttggcgctcaacgacgcccatggcccggtcgtgctgtacaccccaggcgacggtttcgaggagtttgccacgccggcccaggcgcgccaggccttggcaaaacggcttgacgagggaggcgtcaacgccgacctgctgctgcaaaccctgcccctatcgttgcaaaaccgccccgaaccgcccaacggggaagacctgatgctcagcgtcgcaccgctggatggcgatgtactggccgaaggcgtcccctggatgctcaagcgccagcaggcagaagtcgaagcgaaccagctcaaagccccgctgtcagccacggccatcgatgacgctgccgactggtcgtatctgctcgaaggcaccaatgccttgcaggcacgtaatcaagcattggcggataagctgcaacccgagtggctgaaaaacctgagccccgcccaagaagccctcttcgcccatctggagcaagcgcaagaaaaaagcgccgatgcgctggtgccgctgcttgaaactattccggccctgcccactttcgctcgtgatcggatgaacgaagcgattaaaaagcagtacccgaatgccgaggtgaatgccgatcaactgatggttcaggtccgcaccaggactcacgtcaacaacggtcgaaaaaccagcagccatacgcctttcgaaaaaaacaaacaggtatcgctcaccgacctggccctgaaaaaccccaccgagttccccgccggtgaaacggccacgttcacccaaaccaccttcaaactgcctctgagcgacaaacagggcaaaccggtgctcgacgccgatggcaagcctgttgtactggacaccgaccaactcaagcccctggtcaacgccgccgatgtcgggggtgaatacaccgctctgctgaaaaaagaactggccacagacgccgtggcgggcctggcaggacagcggcgtgacgcatggaaagccagccaggctgacctgatggccaaagaggcatttctcgcagaactcaaccccgatgcctataaagccgaagccaaggaggacaagaccagcaagcgcggggcgcaatgggtcgcggccgtactggatcaccccgacccggccaaccgcccgcaagtcgatggcgaaaccatcgagacccacgccctcgtccaacgtggcctgccggttcaaggcgtgatggtgatcggcaacagtaaagatgcggagcgggtgctatacacgccgaatgcacccgacggcatcacgtttcgcgaagtcgccagccaacaggcactcaacaccctgctggaaaaaaacgagtggaagctgtacaccgcgaaccgcaagtcgccggtcagcaaagatgacgtcgcccaagcgaaacagaccctcgacaaacacaagttagatatggcgaggaaccccgccgcagccatcgagaccttcgtcaaagccctcaaactgacaggcgacacatccaccctcacccccatgaccggcaacagcctggatgcgctgtacaagcaacatgtccaattgctgaccgacagggccgaccaccaatccgtcagtagcgctgaagtggcaacgcagtcaagggccaacaaagcgcaattcggtgtggatgtggcgctgatcttcctcgatctgttgcccgtcgtgggcaaaggcgcctcgatgggcgtacttctgggtaaagccggggtgacggcgctgcgtgccaacgccagagtcttgcccaaactgatcaggaacccggcacttggccgggcaatttatgctgactttgccacggcaggggcaggtatgcccgtggttcggacctcgccgctgcgcccggttgccaaggcgcccttgcgcgccattgagcccgcaccgcgcccaacacccagggcgctaccggcgcccgacggcccgccaccggccacgccatcgaccagtagaggtattgtcgcccgaatcgaacagcccaccatcacgaatgtaaaccgtgacctgagcgcctatgccgtgccgaatgacgtgatacagggcgccgtattaggcccaggcagtacttatagggtgggcgacgacttttacgtgcgcttcacggacggcacgggagagcaaagggtttaccagatagagtcgaactttcatgcccgggatggacaggtcactgtcgtcaatccccatttgccgcccacgacaaacaggtcaaacagggccgtggcgtttctagtgtccacaggaaatggcgagtggcaaatcaacaatctggtcggggccgggcgtcatcggggcagacatttgccacccgaagacgtcacctacatggaccggatactctccggcagagcagcctatgatattgatgggagcgcagttactaccgggcaagtcagacgctggttccggcgcgatatgaatagtttctacgacgccctggcaacaggcggcatgccgacacgacctacgctacccgtgatggcgatcaacagtacaccggattcggccatacaaaacagcctgacccaaaacggtgtacgggggcttgtgctgggtgaaatgcatgatgagcctgcggcgtatcagttggtcattgatcagatgcagaacttcaaaaataacggcgtcaccactctgtacgttgagggcgcgccattcctgcagggttctcccaacatttccgacgcagcgctgcgcacctccgatgcggcctactttggccagcatccttacaacttggactacaagagcggccctacgcttacggatatcatcaaagaagcagacaaacatgggataaaagtcgtcgggctagagcaccagcaattgacatggcgtaccgacgatcccatgcatatgtacaaacatgcgctgggccagcagaaccgtcttagagaattcaactatcatgctgcaaaaatcatcgaacgcaccccgcccggcgaaaagttcgtggccatcgtcgggaaatttcatatgaataccgaactgggcgtcccaggcatcgctgaattgaccaacggtatcggcctgtctgtaacgccttcgctaaaaggcagctcaagcctggtcagccagccaccgcacacaccgccaccgtcactgaagttgcagcgcggtaccaacgtccctgagccatacggcgatattcatgtcgattacaacgtggatgcgttgacgaactagacacgccctataaacctcggtcacgccgcctcaacgcggcgtgattattaattgcgcaccagcaaaaacaagcagcaatcaatcactaacaattctcaaaaaacaaatcattaatttcgaaaaatcatcaaaaaacgaaaattatctcaatttttttttgcaacttgccatcccattcgctggcggttagggttgagcccatgaaaacctctcacaccctcattcagctccgccagcaccgcagcctgtgcctcgtcagcgcacgactgccaggctgaatcgatctgcctcgtctttacgttttatccccaaaaacagttccacggcaggccgccttttctcggcccctacaacaaaggatttcccgatgagcatgctcaaagacccgtcttcgaagtaccgcgcgtttccgaccatcgatatcccgaaccgcacctggccatcgaagaccatcaccgaagcgccgatctggtgcagctccgacctgcgtgatggcaaccagtcgctgatcgagccgatggacgcggtgaaaaagctgcgcttctggaagaccctggtcgccgtcggcgtgaaggaaatcgaagcttcgttcccggccgcctcgcaaaccgacttcgacttcgtgcgcaccctgatcgaagacggccacatccccgaggacaccaccatccaggtgctgacccagggccgtgaagacttgatcgcacgcaccttcgaatccctgcgcggcgccaagaaagccatcgtgcacctgtacaacgccacgtcgccgtccttccgccgcatcgtgttcaaccaggacaaggaaggcatcaaggccatcgcggtcaacgctgccaagttgttcgtcaaatacgccgcccagcagccggaaacccagtggaccttcgaatactccccggagaccttcagcgctactgagctggagtttgccaaggaggtgtgtgacgcggtgatcgaggtgtggaacccgacgcccgagcacaagatgatcctcaacctgccggccaccgtggaatgcgccacgccgaacatctatgccgaccagatcgaatggttcggtcgccatatcaatcgccgtgacagcgtgatcatcagcctgcacacccacaacgaccgtggcaccggcgtggccgccaccgagctgggcctgatggccggcgccgaccgcgtcgaaggctgcctgttcggcaacggcgagcgcaccggcaacgtcgacctggtcaccgtggcactgaacatgtacacccagggcctcgacccacagctggatttctccgacatcgatggcgtgcgcaaagtcgtcgaagagtgcaaccagatccaggttcacccgcgtcacccgtacgtgggtgacctggtgcacaccgcgttctccggttcgcaccaggatgcaatccgcaagggtttcgcccagcagaaagacgatgcgctgtgggaagtgccgtacttgccgatcgacccggccgatattggtcgcagctacgaggcggtgattcgcgtgaacagccagtcgggcaaaggcggcatcgcctacctgctggagcaggaatacgacatcagcttgccacgtcgcatgcagatcgagttcagccaggtggtacaggccgaaaccgaccgcgtcggcctggagatgactgcaccgcagatctatgccttgctgcagcgtgaatacctgcaagccaacaccccgtacgcgttggtcagccatcgcctgcaggaagagaacggcaacagctttgtcgaggtggaagtcgcgggcaagggccagggcgaaaccaacctgcactggaaaggcaaaggcaacggcgccctggaagcgttggtggccggcttgccgattggcgtggagatcatggactacaacgaacatgcgatcggtgcgggcaccaacgccaaggcggcggcctacatcgaactgcgtgtgaacggcgagcgaccggtgcatggtgtggggattgatgaaaacatcaccacagcgagcttcaaggcgctgttcagtgcgctgaaccgttcgttgagccagcaggaagcaaaagcagcgtaagcagtctgcttaaaatgtgaaaggcccctggatatgagtcctggggccttttttttggttttttgtggtctgtgagggcctcatcgggggcaagccccctcccacattttgaatgtattcacaaattaaagtgtgggagggggcttgcccccgatagcggtctgtcagacaaactggaaagtatcggcatccaggttggctggaaacctggtgcgatacgcggccaattccgccgcatccaggctcacctggaacactccatccgcctcccccgcactcagcagcgtctcgccctggaagtccaacacctggctatccccggtgtaggcaaagcccttcccatccgtgcccacccgatttaccgccgccacataacacaggttctcgatggcccgcgccggcagcagtcggttccagtgcgagcgccgcgcccccggccagttggcggtgtacagcagcaggtcggtgtcctgggcatcacggctccacaccgggaaacgcaggtcgtagcaaatcaacgggcgaatacgccaacctttcacttcgaactgcacctggcgctcaccgggggtgtagtggttgtgctcgccggccatgcggaacaggtggcgcttgtcgtaatgcaacacctcgccatccggccgtgcccacagcaggcggttgcggtggctgccgtcggcagcctggatgatcacgctaccggtgatgacggcgttgtacttcgcggcctgtgcctgtagccaacggtgggtcgggccgttctcgggttcggccagggttgctgactccatggaaaaaccggtggtgaacatctccggcaacacgatcagatcagcgcctttcgcctgctccaacaataacccgaagtgctcaaggttggcttggcggtcgtgccaggccaggctggtctggaccagggcgatgttcaggttcggcagagcactcagatcgcgcatagtttttcagccgcttgttgcagcgtttcctcacgtttggcaaagcaaaggcgcaccaggcgctggccttggggtggggtctggtagaacaccgagaccggaatcgtcgccacgccgtgttcgcgggtcatccatagcgacatggcgacgtcatccaggtccgggcggatctgtgagtaatccaccagttggaagtaggtgccggtcactggggtaaagctgaagcgcgatggcgccagcaggtcgcagaacagatcgcgcttggcctgatagaacgccggcaactcatcgacatgctccgggtgctcagccatgaaatcggccagcgcgtactgcaatggggttacgccacagaaattgacgtattgatgcaccttgcgcagttcgccggtgagggccggcggggcgacgacgtagccggttttccagccggtgacgtggtaggtcttgccgaaagagctgaccacgaaggcgcgctggtagagttcttcgtgggccaacacgctgacatgggccacgccgtcgaacaccaggtgttcgtagacctcatcgctgaccaggtagatgtcacgctcgcgaatcagttcggccaactggtccagttcggcgcggctgatcagcgcgccagtcgggttatgtggggagttgaggatgatcatgcgcgtacgcggtgacagggccgccttgatcttctcgaagtccagcgcaaagccatccaggcgcagttgcacatgcacgcagcgaccacccgccagctccaccgacggctcgtagctgtcgtagctggggtcgaacacgatgacttcatcaccgttgcgaatcaccgcctggatcgcgcagaagatcgcctcggtggcgcctggagtgatggtcacttcagtgtcggcattgactgtggcgccatagctgcgggcgatcttggcggccacctgctggcgcagcaccggtaagccggtcatgggcgcgtattggttatgcccgagggcgatatgcttgcccactgcgtcgagcaaaccctgggggccattgaagtccgggaagccctgggacaggttcagcgccccggtctcggcagcgagttgcgacatggtggtaaaaatggtcgtgccgacattcggcagcttgctggtgatcatgggagcccccttcggctgagctgcaagttttaagctgcaagccataagcaggtcaaggggcaaaccgccaggcacaaaaaagggctccaaaggagccctctcttgcagctaacaacttgaagctacgattacttcttatcgcggcgcttcttgtcggccttcttatggtgagtcatcaaacgacgcttcttgttcacctgacggtcagtcagtgtgttcttgttgccttcgtatgggttctcaccacccttgaactcgatacggatcggcgtaccgaccagtttcaagacacgccggtaggtgttttccaggtaacgcacgtaggacttgggcaccttctcgatctggttaccgtggatcacgataatcggtgggttggcaccgcccaagtgggcgtaacgcagtttgatccggcggttgttgaccatcggcggcgcgtgctcgccaaccgcgtcttccaagatctgggtgagacggttggtcggccagcgggtgaccgcggacttgaacgagttctgtacggaagcgtagaggttgcccacgccggtgccgtgcagtgccgagataaagtggatatcggcaaactcgacgaagaacaggcggcgttgcagctcgatcttgacgaaatcgcgctcgctcggcgtcatgccgtcccacttgttgatcgcgatcaccagcgcacgtccggcctccagggcaaagcccagcaggttgaggtcgtggtccaccacgccttcgcgggcgtccatcacgaagatcaccacgttggcgtctttgatcgcctgcaaggttttcaccaccgagaacttttcaacttcctcgtggatcttgccgcgcttgcgcacaccggcggtgtcgatcagcgtgtacttttcctcgttacgttcgaacgggatgtagatgctgtcgcgggtggtgccgggctggtcatagacgatgactcggtcttcaccgagcatgcggttgaccagggtcgacttgccgacgttaggacgaccgatgatagcgatcttgataccgtctttttcgctcgggccaggaatgcgcttggcttcctcaccttcggcgacgatttcctcttcgccctcttcttcctcgacgtcatccttggggaaatcgcgcagggcaatttccagcatctgggtgataccgcgaccgtgcgccccggcgaccgggatcgcatcgcccaggcccatcgggctgaattcggctcgggcagcttcaggatcgatgttgtcgatcttgttcgcgaccagataggaacgcttgttgcgcttgcgcaggtgctcgccaatcatctggtcggcagcggtgtagcccgcacgggcgtccaccaggaacaacacgacatcggcttcttcaatggccagcaacgactgctcggccatcttttcgtccatgccatgctcgtcaccggagataccaccggtgtcgacgataatgtaggagcgcccttgccactttgcctcaccgtattggcgatcacgggtcagaccggacaagtcgccgacgatagcgtcgcgagtcctggtcaggcggttgaacaaggtggacttgccgacgttaggtcggcccaccagggcgattacgggaaccatgcggctctccacttcgttatttcagaaaatacaaaagccgctgcaaggcagcggctggtgctcggggcagcataatcaaatgccgcatgccccgccgaagcggggccgcctgggtgttaccccaagcatagttcttacttgatggtcagggcttccagcttgccgctgttgccaaacacataaagcatgttacccaccaccagcggacgcgcacgcaggccgtcgctgtcgatacgctcgcgaccgacgaaacgaccatccacctggctcagcaggtgcaggtagccttcgaagtcaccgaccgccacatagctggagaagacttccggtgccgacaactggcggcgcgccagggagtcgttgctccacagtgccgtggtggaacgctcgtcgacactttcgacagtgccggacgccaggctgacatagacgctgccaaacccttgggcgacaccggcgtagctggaagcatcacgctgccagttgacgcggccgctctgcaggtccagtgccgcaacacggccctggtaagtggcgacgtagatggtttcacccgacaacagcaagccaccgtcaatgtccactacgcggtccagctcggaacgaccttgcgggatggccacacgggtttcccaggccggcacgccgttctgggtatccaaggcgaccactttaccggtcgacaggcctgcaacggccagattgttggtcacaatcggaccactggtaccgcgcagcgtcagcaccgcaggcgtgctgtcgtacaaccaacgctgtgcgccggtgctggcgtcgaggccgatcacacggtcgtcctgggtttgcaccacgacgatatcgccgttggtggcaggcggtgcgagcacttcactggtcacgcgagcgcgccatttctcttcgccggtgctggaatccaacgccacgacttcgcccttgagcgtgccgagcaagaccatgccgtaacccacgcctactgcgccggataccggaatttcgaggtctttcttccacttcacgtcgccgttcatgcgatccatggagatcactacgccggtcacgtcagcagcgacaatgttgtcaccgtcgatagccggtaccagcatgttgtaggtttcgccctggccgtcaccgatggagcggctccactgcttttgcaggaccacttcttccttgaagctggtcagctccgcaggcggcagttctttcttactgttgctgctgcaacccgcggccagaacggccagagccagcaatgctgcatgtttccaacggatcacgtcacgcatcccctttggccaagtcgtccagcttgatttgtaagccaccgaccgccgcttcatcagacagcgccgccttggctttcttgtacgcagcattggcttcgtcggtacgacccaattggaccaacaggtcgcccttgagctcttcgcgagtggctacaaatgccttgtcagcatcgccgtcgagcagtttgagtgcttcgtcagccttgttctgtgccgccagtacctgcgccaggcgctgacgtgcgatttcacccagggtcgggttggtcggcttgtcggcgatggccttcagctcagcggcagcgtcgtccagcttgccggtgtcgaccgcgactttcgcgacgaacaggctgccgtattgggcgtaggtgctaccgccgaattcgttcttcagcttgccggccaggtctgcaacctgcgcagggtcgggcttgccgtccggcgtcagggtggtttccaacaattgctgatagaggatcgaggcgccttgggactggttggcctgatacttggtccaggcttgccagccgaagacaaccactaaagccagcagaccgccagtaaccagaggcttgccgttgcgctgccaccagtccttgaactcggccagttgctcatcatcagtactcgacaccccaatactccttaatcgctaaattcggctgttcgacagcttcaaccctgcacgacgcaggtggccaagtgcgcagcgagcgcatcaaaggcaatgttctgttgctcaccctggccacgcaggggtttgaaacctatcacttgctgggccagttcgtcttcgccgaggatcagtgcatacaacgcaccgctcttgtcggccttcttgaactggctcttgaagctgccggcgcccgcattgacttgcaggcgcagattgggcagttggtcgcgaaccttttcgctcagggccagggctgccagttcggcggcctcgccaaaggcgcacaggtacacgtccacctgacgggagatctcttccgggacctgctcaagggtttccagcagcaggatcagccgctcgatgcccatggcgaagcccacaccggtggtcggcttgccgcccatctgctctaccaggccgtcgtagcggccaccagcacacacggtgccctgggcgccgagtttgtcggtgacccactcgaatacggtcttgctgtaataatcgaggccgcgcaccagcttggtgttgatcacgaacgggataccggccgcatccagccgagccttgaggccctcgaagtggatacgagactcgtcgtccaggtagtcggccattttcggcgcattgaccagcacggcctgggtatcggcgttcttggtatcgaggacgcgcaatgggttggtcttcagacggcgctggctgtcttcgtccaacttgtccaggtgggcggacaggtactcgaccagggccactttgtagcggccgcgggattcactggtgcccaggctgttgagttcaagcttgaccgcgtcgcggatacccagcaggccccacaggcgccaggtcagcacgatcagctcggcgtcgatatccggaccgtcaaggttgaacacctccaggccgatctggtgaaactggcgatagcggcctttttgcgggcgctcgtgacggaacatcgggccgatgtaccacagcttctgtggctggccaccaccggtgaggccatgttcgagcacagcgcgcacgcacgcggcagtaccttccggacgcagggtcagggagtcgccgttacggtcttcaaaggtgtacatctctttttcgacgatgtcggtcacttcaccgatggagcgcttgaacagctcggtgaactcaacgatcggcatgcggatctgcttgtaaccgtagttatccagcaggcgcgcaacagtgctctcgaagtagcgccacagcggcgtctgctccgggaggatgtcgttcatgccacgaatggcttgcagagacttgctcacatcaaatccttaaattcgttcttagccgcgcgcgatcagcgctgcgtcagccgcgaccttttcggccgctttctcgcggatcagtctttcgagatgatccaccagattgtcattcgtcaacttctgcgacggtttgccgtcgatgtagatcaggttcggtgtaccgccggtcaaaccgatgtgcgcctctttggcttctcccggcccgttgaccacacaaccaattaccgcgacatccagcggcaccagcaggtcttcgaggcgcccttccagctcgttcatggttttcaccacgtcgaagttctgccgcgagcagctcggacaggcaatgaaattgatgcctcgggaacgcaaatgcagggatttgaggatgtcgtaaccgaccttcacttcctctaccgggtctgccgccagggagatgcggatagtatcgccaatcccttcggcgagcagcataccgagacccaccgcagatttcactgtgcctgaacgtaaaccgcctgcttcagtgatacccaggtgcaacggctgtacgatttccttggccagcaggcggtaggcttctaccgccatgaacacgtcggaggcctttacgctgaccttgaagtcctggaaattcaggcgttcaaggtgctcaacgtggcgcagcgccgattcgaccagcgccgccggggtcggctcgccgtatttcttttgcaggtctttttccagggagccggcgttgacgccgatacggatcggaataccacggtcgcgagcagcatccaccacggcacgcacacggtcttcgcgaccaatgttgcccgggttgatacgcaggcagtccacacccagctcggcgacgcgcaatgcgatcttgtagtcgaagtgaatgtcggcaaccaacggcaccttgaccagttgcttgatgcgaccaaaggcctcggcagcgtccatgtccggtacggagacgcgcacgatgtccacgccagcggcttccagacggttgatctgggcaacggtggcggccacgtcattggtgtcgctgttggtcatgctctgtacggcgatgggggcatcgccacccaccggcaccgagccgacccagattttgcgcgatacgcgacgtttgattggagattcgccgtgcatgactattgtcccaacttcaggcgagcggtctcgccggtggtgaacggcgctacgtctacaggctggccgttgtaggccacttgcgcgccacgggcaaagcccagacgcagcgtcaaaggaggcttgccgccttggtcgagcgtatctcccttacgcttgagaccgctaaacagcactttgccattgccgtcggtgacttgcgtccagcagtcggcgacgaaggtaatctgtacgcggccatcaccggcgatcaacgctggggtggtaggtggcgaaatcgcaggagctgccggagcggttggcgctggagtcgctggcgcctgcactggagcggccggtgtatgggctatggcccccgaagcagccggcgtcgcgggaaccgttgcggcagcggtcgcggcaggcgcggtttccggtgctggcagctcagtagcggcggatgcttcaggcgcggcctggccttgggcgacagcctggtcttccggctcgtccagcggatgaatctgggtagtgccgtcggcgctttcgacttcgacgtgctccatggcgttgctggtcaggtccttggtgcgctgggaggtctggtcttgccaccagacaaaaccgccaccaatgacagcgatcagcagcaacaggctgacaattcgcaaaatcgtgtgggaaacccgcaccggttcttcgatgcgacccaagccatgcacattgctaccttgggagtcggtgccggtaaactggtcgaactcctggactagaacagtctggtcgatccccagcagcttggcataggcacggatatagccgcgggcgaaggtatgcccaggcaacttatcgaacgcgccagcttccaggttgcccagggatgtactggtcaaattgagcttgagggccacttccgccagcgaccaaccattgctttcgcgggcctgacgcaaggtgtcgcctgggtttacgcgattagctgctacaacttccgggtgcgccgctttcatcattgctccgacaggtattgctgatattccggcgtaccgggatagagtcgttcgagttgctggccaaaacgtgcagccgtgtcgcgttcttcatgaaccgtcgccagccgcacaccgagcaatagactacgtgcattttgcccgctgagcaggctaaaacgctcgtaatagtcacgtgccggcacataatgcctgtcatcaaaggatatctcagccatttcgagcaatgcccgaggctggcgaccattcaagtgcagggctttttccagttgccggcgggcattgtcgcgctggccgaggcggatcgaggtgaccccgaggttctcgaacacccgcgaacgctcaggatagagggtatcggcgctggcctgctggaaataaagagcggcctggtcataacgcttctgcgcaaacaggaaactgccgtagttgttcagcagccgcgggtcggcagggcgtgcggccagggccttgtggaaataccggtccgccagttcaggctcggcctgggcctggaacaccagggccagtgcggcattggcgtcggcatcgtcgctgtccagctcaagcgccttcttcaacggcaccttggcctgctcgttcatcccttgctgaaggtaacccaagcccagttgcacataggcaactcgcgcctcatcacggcctttaccggtttgcatagggctgtcatggcccgatgaaacacaaccagccgacaggccggtaacaagcagaagcagcgcaaggcgcaagggcatagagatcctctctcagattcgattcacagcgatcagcggtaaatcgtcggcggcgttcacttcacgtccggcgatataacgctcgctgcggcgggtgcggtccatcacctgcccgaccaattggccacaggcggcgtcaatgtcttcaccacgggtggtgcggacggtgacgttgtagccagcctggtgcagttgatcctggaaacggcggatggcgttgttgctcggtcgctcgtagccagaatgtggaaacgggttaaacggaatcaggttgatcttgcacggggtgttcttgagcaactcgatcatctcgaccgcgtgctcgaccttgtcattgatgtctttgagcaaggtgtactcgatggtcagcacgcgcttttcacccagggacgacatgtagcgctggcaagattcgagcagcatcttaagcggatacttcttgttgattggcaccaattggttacgcaatgcgtcattgggtgcgtgcagcgacaacgccagggagacgtcgatgtgcttggacagctcatcgatcatcggcaccacgccggaggtggacagggtcacacggcgcttggagatgccgtagcccaggtcgtccatcatcaggtgcatggccgaaaccacattgtcgaagttcagcagcggctcacccatgcccatcatcaccacgttggtgatggcacggtcgacggtcgccgggacgctgccaaaggatttgttggcaatccacacctggccgattacttcggcggcggtgaggttgctgttgaagccttgcttgccggtggagcagaaactgcagtccagggcacagcctgcctgggacgaaacgcacaaggtgccgcgtttgccctggggaatgtacacagtctcgacacagctgccggacgccacgcgcaccacccacttacgggtgccatcgctggagatgtcctcgctgaccacttcgggaccacgtacttcagcaatggccttgagcttgtcgcgcagggccttgctgacgttcgtcatggcgtcgaaatcatcgacgccaaagtggtgaatccatttcattacctgaccggcacggaaacgcttctccccgattgagtcgaagaatttctccatttccggctgggtcagccccagcaggttggtttttacagtcgatgtcgtcatggattcaccctcactctttaagccgatgcttagcgagcggttacttcagtagcggcgaagaagtacgagatttcgcgagcagcagcagcttcggagtccgaaccgtgtacagcgttggcgtcgatggactcggcgaagtcagcacggatggtgccggcagcggcttctttagggttggtagcgcccatcagctcacggttcagagcgatagcgttttcgccttccagaacctggacaacaacaggaccggagatcatgaaggcaaccaggtcgccgaagaagccacgagcgctgtgctcagcgtagaagccttcagcttcagccttggacagttgcttgagtttcgaagctacaaccttcaggccggctttttcgaaacgagtggtgatctcgccgatgacgttttttgcaacagcgtcaggcttgatgatggagaaagtacgttgaacagccatggtgtaactccagaaacggtaatttacgaaaaattaaacccgcgaattatacgcgggttattgggtattgcctaactgcgtaagggaggcgtcagtcctgttcttctttccaggcagtctggatagcctccaggaccttttcaccaccgcgatcacgctcatcttcgaaccctggcaacgccatgaccatgtcacgcaaagctacaaagttcagggagtaaggatccagatccgggttggcatctgccaacaggatagcgatctcttgcacatcaacccatttaagactcatgacacttccttgaatcaatgcggcgcttcggcagcatggttgagggaatacttcggaatttcgacagtgatgtcttccgtgccgacctttgcctgacagcttaggcgagaagtcgcttccaggccccaggcacgatcaagaaagtcctcttccagctcgtctgcttcttccagagtgttgaaaccctcgcggatgatgcaatgacaggtggtgcaggcgcagacaccgccgcaggcactttcgatctcgatgtggttgtcatgggcaacttcgaggatggacttgccggtctcagcctccacgaccataccgtccgggcaatgctcggcgtgtggcagaaaaatgacctgcggcattaattattcctcgatttcattcaggttgcgcccggccagtgcggctttcaccgtctgatccatgcggcgggcggcaaaggcatccgtcacttgcgacaggcgcttggtctgttgctcgatggcataaccgtcgttgcctttcatcagttcggccagttcctgcatctgcaggtcgatgaccatgcgctcttcggcatccagcaggcgctcgccgtcggcatccagcgcgccctgcaccgcttcgagcaggcgctgggcgtcgacttgctgctcacgcaatacacgggcgaccttgtcgtcaccggcatattggaacgagtccttgagcatcttggcgatttcaccgtcggtgaggccgtaggacggcttgacctggatgctggcttccacacccgaacccaactcgcgcgcggcgacgttgagcaggccatcggcgtcgacctgaaaggtcacgcgaatctttgctgcgcccgcgaccatggccgggataccgcgcaattcaaagcgcgccagggagcggcagtcgctgatcagctcgcgttcaccttgcagcacatggatcatcatggccgtctggccatctttgtaagtggtgaagtcctgggcgcgggcgacggggatggtggtgttgcgtggaatcaccttctccatcaggccccccatggtttccaggcccagggacagcgggataacgtcgagcagcagcaattcgccaccatcacgcttgttgccggccagggtatcagcctggatcgcggcgccgatggcgaccacctgatccgggtcgatttcagtcagcggctggcggccaaaagcttcggcgacggcttcacgcacgcgtggtacgcgggtggacccaccgaccatgaccacggcaccgacttcttccagctcgataccggaatcgcgcaccgcgcggcggcaggctttcaggctgcgggcaaccattggctcgatcaacgcatcgaaagcttcgcgggtcagttgggccgaccaggtgccgtaggaaacttcaacgcttgcagcattggtcagcgcttctttggccgcgcaggcggtttgcagcaggttgcgctgcgcgcccgggtccagatcggcagacaagccggcgctggtgatgatccagcccgcaatggcgtggtcgaagtcatcgccgcccagggcgctgtcgccgccggtggcgagcacttcgaagacgccgccggtcaggcgcaggatcgaaatatcaaaggtaccgccgcccaagtcgtaaatagcgacgaggccttctgcatgctggtccaggccataggccacggccgctgcggtcggctcgttgagcaggcgcaatacgttcagaccggcgagtttcgccgcgtccttggtggcctgacgctgagcgtcatcgaaataagccggaacggtgattacggcaccgaccagttcgccgcccagggttttctccgcgcgctggcgcagcaccttgaggatatcggccgacacttccaccgggcttttcgggccttggacagtgtcgatgaacggcatatgggattcgccgccaacaaagcggtacggcagctggtcgcccaattgcttgacgtcggacagaccacgacccatcaagcgcttgaccgacagtacggtattcaaagggtcggaagacgccgccagcttggccaactcaccgacttcgatgcggtcggcgtggtagcgaacggcagacggcagaatcacctggccatcagcgtccggcagcggctcggacaagccgctgcgcaaggcagcaaccagggaattggtggtgcccaggtcaatcccgaccgccaggcgacgctggtgcggttgagggctttggccgggttcggcgatttgcagtagggccatggtaatcaggtcttatctgtctatcaggcgtgcatcacgggcagcacactgggttaatcgtcgaggcgctcttctagctggcgcacttcgtaggtgagcttgtcgaggaactgcatgcgccgcatcaggcgttcggcctgctcacgttgcgctgcatcatcccaacaggctgcgaagctttcgttgagctcatcctgggcggttttcagacgacgcttgaagactgcaacaccagccagatcggcctcgtcctgcaagtcttcgagttcttcgcgccactgcatctgctgcatcaggaagtccggatcatgcacggtcacttccagcggcaactcgccaccgttcatcgcgagcaggtagcgcgcgcgtttcggggggcttctgagcgtctgataggcttcgttgaggctggccgattgctccagcgccagacgttgctcacgctcggaagcgtcagcgaagcggtccggatgcacgccacgcgccaattctcggtagcgcgtggcaagttgctcaaggtccagccgaaagctcggctgcagctcgaataaagcgaaatgacaaggagtacccacgaatagcctcagatgttgaagctttcgccgcagccacattcaccgcgtacgttggggttgttgaacttgaagccttcgttcaacccttccttgacgaaatcgagctcggtgccgtccaggtaggtcaggcttttagggtcgataatcactttttcgccgtgactttcgaacacctggtcttccgcaaccacctcgtcgacaaactccagcacgtaggcaaggccggaacagcccgtggtgcgaacacccagacgaatcccctcacctttaccgcgcccattcagggagcggcgaatgtgctgcgcagccgcttctgtcatgctgatagccatcattgactccttactcgtcgccaaatgcttagatcaagcctttcttctgcttgtagtcgcgaacggccgccttgatggcgtcttctgcgagtaccgagcagtggattttcacgggcggcagggccagttcttcggccagctgggtgttgctgatggtgacagcctcatccagggtcttgcctttcatccattcggtcgccagcgaactggaagcgatggccgaaccgcagccgtaggtcttgaacttggcgtcttcgataacgccagcgtcgttgaccttgatctgcaggcgcatcacatcgccgcacgccggagcgccgaccatgccggtgccgacatcagggtcttccgcgtccatcttgccgacgttgcgcgggttttcgtagtggtcgatgaccttttcgctgtaagccatggtactgaatcctcactcatcagggccgctctggaaccctgtagaaacgcctgcgttttccgccacgttcctacagagctggggtggcggcttctatagttagtgtgccgcccactcgatcttggaaatatcgacaccgtctttgtacatgtcccacagcggcgacaggacgcgcagcttgttgacggcttcgcagactttctgcgcggcgtagtcgacttgctcttcggtggtgaaacggccgaacgtaaagcggatcgagctgtgtgccagttcgtcgttgcggcccagtgcgcgcagtacgtacgaaggctcaagggacgccgaggtgcaggccgaaccggacgaaaccgccaggtccttgagcgccatgatcagcgactcgccttcgacatagttgaagctcaaattcaggttgtgcggtacacgggcggtcatgctgccgttgatgtacagctcttcaaggccttcgacctgcttgtagaagcggtcgctcagcgctttgatgcgcacgttttcggcagccatgtcttccttggccacgcggaaggcttcgcccatgccgacgatctggtgggtcgccaaggtacccgaacgcatgccgcgctcgtgaccgccgccgtgcatggtggcttcgatgcgcacacgtggcttgcggctcacgtacagggcgccaatgcctttagggccataggttttgtgggccgagaacgacatcaggtcgactttcagcttcgacaggtcgatgtcgaccttgccggtggactgggcagcgtcgacgtgcagcaggatgcccttggaacgggtcagctcgccgatggccgcgatgtcgttgatggtgccgatttcgttgttcacgtggatcacggaaaccaggatggtgtcttcacgcagcgcggcttcgatcatggccggggtgacgataccgtcggtggtcggctcgaggtaggtaacctcgaaaccttcacgctccagttggcgcatggtgtcgaggacagccttgtgctcaatcttggtggtgatcaggtgcttgcccttggtcgcgtagaaatgcgccgcacccttgatagccaggttgtcggactcggtggcaccggaggtccagacgatttcacgcggatctgcgccaaccaggtctgccacctggcgacgagcgttctcgaccgcttcctcggctttccagccgaatacgtgggaacgggaggccgggttgccgaagtttccgtcaaccagcaggcattcgctcatcttttgcgcgacacgcggatcaaccggggtggtcgctgagtaatcaaggtaaatcggcaatttcatggactttctcctaaatcaggctggctggcgtgccgttagctcttcggctgtcactcgacggcggacgcttcgatcttgtccagacgcggcgccttggtgttgcaacggcgctggtcctgacgctgggctacttcttgcacctcacggcgagtcacaagatcagccaagctgataccactcaaaaactcatggatctgcaggctcaagtcacaccacaagtggtgcgtgaggcaggtgtcgccggcgtggcaatcacccagcccctggcatttggtggcgtcgacggattcgttgaccgcgtcgatcacctgggcgacctgaatgccctgcatgtcacgggacaactgatagccaccacccggcccacgcacactggacaccaggttgctgcgacgcaatttggcgaacagttgctcgagataggacagggaaatgccttggcgctcagagatatcggccagggacaccggcccagtttgcgcgtgcaaagccaagtcgagcatggcggtcaccgcgtatcggccttttgtagtcagtctcatggacaagtaccaaggtgtttcagaatgggagcaagtatgcgattcccgagtatttaagtcaactataagacctagtactttagtcaggattacccgtaaaaagggcgcgcgaatcatagcaggatggggtggggacgaacagcgggaacagggccggatggagattgctggatcaacggaggtcaacatgtgggagggggcttgctacagatagcagtctgacagctgaagaatgcatcgactgacccactgtcatcgggggcaagccccctcccacatttgagctgcattggtcgcgaggcctcagccgaccttggtggcggcttcgtccttgatttcggcgaagtcttcttcgcgcaactcaggcagatccttggcgcaatacgggctacccagatccttcagcgcaccacacataccctccaacttgccgtccaccgcctgcagatggtcgagcaactggccgatagcgcgtgccaccgggtcgggcatatcttcgctgacaccgtaggcatcaaaaccgattttctcggccatggccttgcgcttggcctcctgctcgtcgccggcttccggcttgacgatgatccggcctggaataccgacaacggtcgcacctggaggcacagccttggtcacgacagcattggaaccgaccttggcacccgcgccgacagtgaaagggccgagcaccttggcgcccgcccccaccaccacgccatcacccagcgtggggtgccgcttgcctttgttccagctggtgccgcccagggtcacgccctgataaagggtgacgtcatcaccaatttcggcggtctcaccaatcacgatgcccatgccgtggtcgataaagaaacggcgcccgactttggcacccggatgaatctcgatcccggtcaaccagcgaccgaagttcgacaccagccgcgccagccatttccagcccatgccccacaaggtgccggacaggcgatggatccagatggcgtgcatgcccgggtagcaggtgagcacttcaaaggcattgcgcgccgccgggtcacggtggaaaacactctggatatcttctcgcaaacgctcgaacatttttaatccttccgtttaagaagctcgccacgggccgccttctgggtttccgtgaggatgccacgcaatatattcatttctgcccgactgaccgagctgcgtccgtaaaggcgacgcaggcgcgccatcaagtgccgtggtttttccggatcgaggaactcgatggccaccagggtttgctccaggtgttcatagaaccgttccagctcgtccatggtggccaactcgccacttttggtcgaggcaacctcttccttctctaccttgcttggctgaccagcagcggccagccaggccatgcgcacttcgtaagtcaacacctgcaccgctgccccgaggttcagcgagctgaattcagggtctgatgggatgtgcacgtggtaatgacatcgctgcagctcttcattggtgaggccggagtcttcgcgaccaaacaccaaggcgatttcagcgccaccggcggcctcttccaccaccttggtgccgcactcacgcggatccagcaatggccaggggatgcgacggtcgcgggcactggtgccgagcaccaggctgcagccgaccaaagcgtcttccaaggtggcgacgacctgggctttttcaagcaggtcattggcaccggatgcgcgggcatcggcctcgtgatgcgggaacacgcgtggttcgaccagcaccaggcgcgtcagccccatgtttttcatggctcgcgccaccccgccgatgttgccggggtgactggtattgaccaagacgacacgaatgttttgcagcaagggaggcgctctcggacacgggaaaggggagcaaatcttacagaacagcctaaggttatgccatgaaagctaacgtcgtccttcacctgaagaaagtttctgctagaatgctcggctttctttaacaaccttaggtgacacatccatgcagcccatgctgaatatcgcgctgcgcgccgcccgcagcgccagtgaattgatcttccgctccatcgagcgcctggataccatcaaggtcgacgaaaaagacgccaaggattacgtatccgaggtggatcgcgccgccgaacagaaaattatcgacgccctgcgcaaggcctaccctacccacggcatcctcggtgaagaaaccggcctgcacaaaggcagcggtgaaggcgaagactacctgtggatcatcgacccactggatggcaccaccaacttcctgcgcggtatcccgcactttgccgtgagcatcgcatgcaaataccgtggccgcctggaacacgccgttgttctggacccggtccgccaggaagaattcaccgccagccgtggccgtggcgcccaattgaacggtcgtcgcctgcgtgtcagcggtcgtaccagcctggacggcgccctgctgggtactggcttcccgttccgtgacgaccagatggacaacctggaaaactacctgggcatgttccgcgccttggttggccagaccgccggcatccgtcgcgctggcgcagcaagcctggacctggcctacgtggccgccggtcgttttgatgcgttctgggagtcgggcctgtccgagtgggacatggcggcaggcgccctactgatccaggaagcgggcggcttggtgagcgacttcaccggcggccacgacttccttgagaaaggccacgtggttgccggcaacaccaagtgcttcaaggcagtactgacggccatccagccgcacctgccggcttcgctgaagcgttaagcgagcgagcacaaaaaagcaccccgaggggtgctttttttatgcctgggatttgaggtttgccgcaactccagcaacaacacaaatcaattgtgggagggggcttgcccccgattgcagtgggtcagcacctaacaagctgactgatccaccgctatcgggggcaagccccctcccacattttgaactcacataattttttgcatctgtaccaggcttgagattactgctggttctggcccagcaccaagcggccttccttgtcgaccggaatctggccgcctggatcacggtccatacgcaccgagccttccttgccatccaaggtgtaacgcacgtcataaccgacaaccttgtcgctgatgtcgttgacggtgttacaacgggtttgcgtggtggtgtaggtatcgcggttctgcataccttcctgaaccttgttaccggcataaccgccaccgaccgcaccggctacggtagccagcttcttaccgttaccgccaccgacctggttacccaataggccaccggccagtgcaccgaccaccgtaccgacgatctggtgctgatcctgcacgggcttctgccgagtcacggcgacgtccttgcagacctcacgcggcgttttaatctgggttttcaccggctgcactgccagcacttgcgcatactcagggccgctttttaccaggctgtaggtggcaacagcacccccggcagtcacaccgacagcacccaataccgcaccaaccagtaacgacttgttcacatgaacctcctgaccatcacaaacggatcgaaagatccgcgctatacccagccttggagcaaaaaaaaaggcacgagttcaatactcgtgccttctttgtaacagcggatcaacaagcgcccatcaagggcggtcgtcaacctccttgccagtagccgcaggagggatcagatcttcgctgttgaggttcagccagatcagcaccacgttggcgatatagatcgacgagtaggtacccgccagcacgccgatgaacaacgccagggagaaaccccacaggttgtcgccgccgaagatcatcagcgccgcaatcgccagcaacgtggagatcgacgtcgccatggtgcgcagcagggtctgggtggtggagatgttgatgttctcgatcagcgaggccttgcgcagtacacggaagttctcgcgaacccggtcgaataccacgatggtgtcgttgagcgagtaaccaatgatcgccagcacagccgccagcacggtcaggtcgaaggtcacctggaagtacgccaggatacccacggtcacgatcacgtcgtggatcagcgacacgatcgcgccaacaccgaacttccactgaaagcggaacgccaggtagatcatgatgccgaccagcgccatcagcatgccgaggccgccctggtcgcgcagttcttcacccacttgcgggccgacgaactcgacgcgcttgaccgacgccgggttgtcgccgccgaccttctgcaaggcctcggccacctggtgacccagttgcgggtcttcgcccggcatacgcaccagcaggtcggtggtcgcaccgaagctctgcacgatggcttcgtgatagccggccttgaccagctcgttgcgcaccagggtaacgtcggcaggcttctcgtaggtcagctcgatgagcgtaccgccggtaaagtccagaccgtagttcaggcccttatggaaccagctgaacaacgccagaacggtaaggagcacggtgacgccgaacgcaatgttgcgaacgcccatgaagttgattgtacgtaacatggcagccccttaaatccacaacttcttgaagtcacgcccgccaaagatcaggttgaccattgcgcgggtcaccatgatggccgtgaacatcgaggtaaagatacccagggacatggtcaccgcaaaacctttgacggggcctgtgcccatggcaaagagaatcccgccgaccagcaaggtggtcaggttggagtcgagaatcgcagtaaatgcccggccgaagccttcgttgattgcacgctgtacggtcatgcccgccgcgatctcttcacggatccgcgagaagatcagtacgttggcgtctaccgccatacccatggtaagcacgataccagcgatacctggcagggtcagtgtagcgcccagcagcgacatcagggccagcagcatcaccatgttgcccgccagggccacggtggcgatgatgccgaagaagcggtagatggcgatgatgaacagcgacacgaacaacatgccccacaaagcagcgtcgatacccttggtgatgttgtcggcacccaggctcgggccgatggtacgttcttcagcgaagtacatcggtgcggccaggccaccggcacgcagcagcagggccagctccgaggattcgccctggccgttcaggccagtgatgcggaattgagcacccagcggcgactggatggtcgccaggctgatgatcttcttctcttccttgaaggtctggaccggtacgtccttctcgacgccgtcgaccatctgcttggtgtaagtggtgacagggcgctgctcgatgaagatcaccgccatgctgcgaccaacgttgctgcgcgtggcgcggctcatcaggtcgccaccgtggccatccaggcggatgttcacttcaggcgtaccgtgctgcgagtcaaaaccggctttggcatcggtgacctggtcaccggtgatgatcaagccacgctcgatcagtgcaggaggacgattgccttcgcggaactcgaactcctcggcagtggcgcgggtagcacccggctcggccgccagacggaattccaggttggccgtcttgcccaggatacgcttggcttcagccgtgtcctgcacgcccggcagctcaaccacgatgcggttggcgccctggcgctggacgatcggctcggctacacccagctcgttgacgcggttacgcaccgtggtcaagttctgcttgatggagtattcacggatttccgcgatcttggccggcgtcatcgccaggcgcagtacaggctgaccattgaggtcggccggtacgatgtcgaaatcgttgaagttcttgcggaccagcgcacgggcctgttcgcgggacgcttcgtcagagaaacccaactggatggcaccgttgaactgcggcaggctgcgatagcgcagcttctctttgcgcagcaggctcttcacgtcgccttcgtagactttcaggcgagcgtcgagggctttgtccatgtcgacttccagcaggaagtgcacaccaccggacaagtccaggcccagcttcatcgggtgcgcgccaatgctgcgcagccattgtggcgtggtctgtgccaggttgagcgcgactacatagtcatcacccatggccttgcgtacgacgtccttggccggcaattggtcttctgccttggtcaggcgcaacaagccgcctttggcacccgccgccaatgttgccgccttgacctggatccccgcatcagtgagcgctttgctcgcacggtccagatcggcctgattgacctgcagcgaagtgctggcgccagtgatctggatcgccgggtcatcaggataaagattgggagcggaataaataaaaccgatcgccagcaccgccaggatcagtacgtatttccacagagggtatttgttcagcatcacgccgcccgcttataacgcggggcgccttgcgcgccccgtcgattggtaaaggttgttactcagatcgctttgagcgtgccttttggcagcgtggcggcgatggcgcccttctggaacttcatttctacggtgtcggagacttccaggaccacgaaagcatcggaaaccttggtgatcttgccggcgataccgccagtagtcaccacttcgtcgcctttttgcaggctgccgagcaggtttttctgctctttggcgcgcttggcctgtggacgccagatcatcaggtagaagatgaccaggaagccgaccagaaaaatccactcgaaaccaccgcccataggaccggcagcggcaggcgcagcggcatcagccatggcgttagagataaaaaagctcatttagcactccagttgcaaatagtgaatcttagggtcggaaaactcagtccaagggcggcacagggagcccgcgcttggcatagaaggcatcgacgaaggcggccaatgtaccctgttgaatagcctcgcgcaaaccagccatcaggacttggtagtgacgcaaattgtggatggtattcaacatgctacccagcatttccccgcacttgtccagatggtgcagataagcacgggagaagttctggcaggtgtagcagtcacaggtgggatccagcggcgaatcatcatggcgatggaacgcgttacggatcttcagcacgcctgtatcgatgaacagatgcccattgcgggcattacgggttggcatcacgcaatcgaacatgtccacaccgcggcgcacaccctctacgagatcttccggtttgccaacgcccataaggtaacgaggtttgtcagccggcatcaggcccggcaggtaatccagcaccttgatcatctcgtgcttgggctcgcccaccgacagaccgccgatggccaggccgtcaaaaccgatcttgtcgagaccttcgagcgagcgtttgcgcaggctttcatgcataccgccctggacgatgccgaacagcgctgcggtgttgtcgccatgggcgttcttcgaacgctgtgcccaacgcagggacaattccatggagatacgcgcgacgtcctcgtcagccgggtacggcgtgcactcgtcgaaaatcatcacgatgtcggagccgaggtcgcgctgcacctgcatcgactcttccgggcccatgaacaccttggaaccgtccaccggcgaggcgaaggtcacgccctcttccttgatcttgcgcatggcacccaggctgaacacctggaaaccacccgagtcggtcaggatcgggccttgccacttcatgaagtcatgcaggtcgccgtgcttcttgatcacttccgtgcccgggcgcagccacaggtggaaggtgttgccgaggatgatctcagcgccggtggcgacgatgtcacgcggcagcatgccttttacggtgccgtaagtgcccacgggcatgaaggccggggtctcgacggtgccgcgcgggaaggtcaggcgaccacgacgggctttaccgtcggtggcgagcaattcaaacgacatacgactcatagttgttcctctgggccgcgtggcgccgggttacgggtgataaacatcgcatcaccgtagctgaaaaaacggtatccattggcgatggcggcttgatatgcggccatggtctcgggataaccggcaaatgccgacaccagcatcaacagcgtggattccggcaaatggaagttggtgaccaggcaatcgaccacatggaacggccggcctgggtagataaagatgtcagtgtcgccactgaacggcttgagcacgccatcacgcgccgcactctccagcgagcgcacgctggtggtgcccaccgcgatcacccgcccgccccgcgccttgcacgaagccacggcatccacgacgtcctggctgacttccagccattcgctgtgcatatggtggtcttcgatgttatccacacgcaccggctgaaacgtcccggcccccacgtgcagggtcacataggcggtctcgacgcccttggccgcaatcgcatccagcagcggctggtcgaaatgcagcccggcagtcggtgcagcgacggcgcccaggcgctgggagtacaccgtctgatagcgctcgcggtccgagtcttcgtcggggcggtctatataaggaggcaacggcatatggccgacacgctccagcagcggcaacacttcttcggcaaatttgagctcgaacagcgcatcatggcgcgccaccatctcggcttcgccaccgccatcaatgaggatgctcgaccccggtttcggcgacttgctggagcgcacatgggccagcacgcgatggctgtccagcacccgctccaccagaatctccagcttgccgccggaggctttctggccaaacagccgcgccggaatcacccgggtattgttgaacaccatcagatcgcctgggcgcaaatgctcaagcaaatcagtgaattgacggtgtgcgagggcaccgctcaccccgtccagggtcagcagtcgactggcgcgacgctcggccaaagggtggcgagcgatcagcgaatcagggagctcaaaagtaaagtcagcaacgcgcatgatggggttcgtctagcagggccgggaagtctagcggaaatagtcaaaattgaccatgaaacgtgattgaccaacggtaatcacctctctatacttcgccgccattgagccctgatggcggaattggtagacgcggcggattcaaaatccgttttcgaaaggagtgggagttcgagtctccctcggggcaccatcttaaaaaaagaccttgaaattcaaggtcttttttttcgtctgcagaaaagtggtttgtccacgcaaccactacacacccacccctcccccctcacttatgcaagatcgcccgataaatatcctccagcgccatgatgcgctgagcggcgttgagtttgatggcttccttgggcatgccgaacaccacgcaactggcttcatcctgggcgactgtcgcggccccggcctcaagcatttccttgagcccgcgcgcgccgtcgtcgcccatgccggtcatgatgattccggtggcattcctgccggcgtagcgggccaccgagcgaaatagcacatccacggagggtcgatggcggttgaccagcggtccatcgatcacctgagcgtggtaataggcgccgctgcggttgaccatcaggtgcttgccgccgggtgcgatcagggccaggccaggcaggatacggtcgttgttgcgcgcttcgcgcacctcgatttcgcacacgctgttgaggcgctcggcgaacgaagcggtgaacttctcgggcatgtgctgcacgatcaccatacccgggcatacgcgcggcagtgccgtcagcacggcttccagcgcttgggtgccgccggtggaggtgccgatggcgacgatgcgctcggtggtctgggccatggcatggccattggcggcgggcaggatcgcatcggcagtgagcttgctggccggaaccagtggtgggctgacgctgcgctttcccaggttcctgacgttggagtttgcggcggcccggatcgcggccaccaactcggccgccgactcaatcaggaaactcttcaggccggttgagggcttggtgatgatttccacagcgcccgccgacagcgcctgcagggaggtttccgcgcctttctgggtcagcgaggagcagatcaccaccggcgtcggccgctcgctcatgattttcttgagaaacgtgatgccgtccatgcgcggcatttcgacatccagcacgatcacgtccggccattcccgcgccagtttgtccatggcgaaaatcgggtcggaagccgcccccatgacgtggatatccggcgtatcgctgagaatcgccagcagtacctggcgcaccacggccgaatcatcgaccagcagcacactgatttttttggtaggcatcttcttgaagtattcccattggttggtgccgaacccagacgttgccgttccacaggtcgaacatgatcgtgcggtaaccggtactgcccatgtcctgggcggtcaggtgcaggtgatgacgctcggccagggccagcgccgcgcgaatattcaggctggccacgtcctgcgtcggcaggcggcgttgcagatcaggaaacatctcgccgccaccgaacaacttgacctggtaatcccgtgcatgcgtgccattgatttgcgcgtggcgcagcagcagttccagtgcttcgtcggcataccggccatcgaggggctgatggttgcgcaggcgccccggcagcatgaagtgacacatgccgccgatcagccgctgcggatgccaaaaggtgatcgccacgcatgagccgagcaaggtccgcaggcgcgtcggccgcgttgcaaaactgacttggccaggcgccaataccacttcggtcgtacccacgggctttttcatggcttgcggtaaatcgacggcgccaccagcttcaaggtgtcattgacgccgtggaggctttcggagtgactgatgatcaaataaccgccgcgtttaagcagcggcaacagacgcgcgaccacctggctcttggtctgctgatcgaaataaatcatcacgttgcgcaggaaaatcacctcaaactcccccagcgccggcagcgcttcgttaaggttgacctggataaagttgacgcggttgcgcaaggtcttgtcgatcaggacggtgccctcctgacgtcccatgcccttgaggcagtacttgaccagcagcggctggggcaatgtctcaatgcgttccattgagtaatgccctgtgcgcgccttggccagtacctgggagctgatgtccgagccgatcacttcccagggcgtggtgccgaggctttcggccagggtcatcgccaggctgtagggctcttcgccggtggaactcgccgcgctccacacgcgaaacatccggcccggcgcggcctggggcaacacgtgctgacgcaggaagtcgaagtgcttgggctcgcgaaaaaaataggtttcgttggtggtcagcaaatccagcgcaacctgcagttcgcccttgcgctggtcattcatgatcagcttgaaatactcaccatagctctgcagctcatagtgcttgaggcgcttgaacaggcgcccggccaccagggctttcttggcgggcgacaggttgatgccggccgcccggtacagccaggtctggaactgaccgaattcacggtcgtcgatggagacggtgtctgacatgatcgagcctcaacgcaggtcgaggtcaggggccggcgcctggccggcctcggccaggctggacatctcgtcgatggacagcaccttgtccacttccagcacgatcacgaatttgccctcgaccttggccatgccactgatgaaatcggcgcgaatgcgcgcaccgaaactcggtggcggttcgatctgcgtggccgggatctcctgcacggcagataccgtatcgaccagcagcccgatgtcctgtggctgaccgtcctcggtactcgcctcgatgatgatcacgcaggaacgccgagtgatcgccgagttggcccgcccaaagcgcgccgacaagtccaccaccggcaccaccgcgccgcgcaggttgatcaccccgcgcacaaaagcgggcatcatcggcaccacggtcaggctgccgtattcgataatttccttgatccccaggatgccgatggcgaacatttcgccgcccagcatgaaggtcaggtactgcgcatcctcatcgaccgccaccgcagtctgccgagtcgtcattactgcacccatgtcactactctcccttgtaggcgcgcatcgatcgtgcgatcagaagcgggtgaaatccgattcgtccggggcactggccatggtgtaggcgaacgccttgcgcggcgccgttggtttagggcgtggcggctgacggttgggcgtgctgccagggctgtccgcgccggcgctttgaccagcagccttggacgctgaatccagcacgaagaaactcatggcctgttgcagttgctcggcctggctgctcatttcttcggccgtggccgccagttcctcactgctcgaggcgttttgctgggtcacttggttgagctgggtcatcgccgtgttgatctgcgctacgccagcggcctgttcttcggacgccgcgctgatttcctgcaccaggtcggacgtcttgttgatggaaggcaccatttcgtcgagcaacttgccggctttctcggccatctccacgctgctggaagacagttcgccgatttcctgggcggcgacctggctgcgttcggccagcttgcgcacttcggcggccaccacggcgaaacccttgccgtgctcgccggcccgagcggcctcgatggcggcattaagcgcgagcagattggtctggtaggcgatgtcatcgatgatgctgatgcgctgggcgattttcttcatcgccaccaccgtctgctgtaccgattcgccgccctcggtggcttccttggccgctttgctggccatgccgtccgtgaccttggcgttttcggtgttttgattgatgctggcgctcatctgctcgaccgacgcactggtttcctcgacactggctgcctgttcactggtggcctggctcatcgattgcgcggtggcgctaacctgttcggaggcgctggcgaggttatcggaggcgttacgcacttcgccgatgatatgggccagcttgccgaccatgttgcgcatggcgttgagcaccatgccggtttcatctttgccacctggctcgatgtgcgcattaaggttgccttcggccaattgctcggcggcgctcgccgcctggcgcaacggccgggaaatgatccgcgcgatgaatatcgccaggcccagaccgatcagcagggatgcggccagtaccgcgatgatcgacacgcgtgagctttcatacagcgccgagcccttgtcacccgcggcagtggcgccggcgtcattgagctcgaccattttctgcaggcggctggtcacctcatcgaaatgccctttggattcaccccggagcaaactgcgcgcctgggcttcctggttctgacgggaaaactccagaacctgcttgctgctcgcaatgtaggcgtcccatgcgcttttcacgctgagcaggagttgacgatcttcatcgttcgacagcaattgctcgtaggtctgcatgcgggtttcgaactcctggcgcgcttcggtggcttcgcgttcggcctgggccttttcttcgggaatctcggtaccgatgtggcggttttctttcaagcgatagttggcggcaaaaaaacgcatgcctgaggctgcacgcatggagggcatccagttgcccttgatgtcctgggcggcctggttgacggcaccgagctgaaggatagcgaaggcgcccatggccccggtgagggccaggaccaccaggaacgagctgatcagcttggtggaaattttaagatcgtagaaccatttcatcggggaacctccatggaattgcaaagacgtcagcgggcgacgagcggtggcgactgaggcgcctgggccgtgcgggcttccagttgtacgatttgattgagtagcgccggtacatccaggatcaaggccaccgcgccgctgcccagaatggtcgagccactgataccgcgcagtgcgccgaacaacttgcccagtggcttgatcaccgtctggaactcgccgtgcaggtcatcgaccaccagcccggccttgtgctcggcatagcgcaccaccaccacgttttgacggcgggcggccgggccttcgtggctgaagtggtcgcgcaggtccaccaggggcagcacctcgccacgcaggtccagatagccctgatcgcggctcgactggcgctggcgttcatccagctcgacgcattcctggaccatgtccagcggaatcacgtaggtggattggtcgacgccgaccaggaagccattgatgatcgccagggtcagcggcaagcgaatgcgcaccaccgtgccctggcctgggcggctgtcgaggtccacggtgccgcgcaacagcgtgatattgcgcttgaccacgtccatgccgacgccacgcccggacaggttggtgacggcctcggcggtagagaagcccgcctcgaagatcaggttgtagacctcctggtcggagagcaccgcgccgctggccaccagcccgcgttcctgggctttttccagaatgcggtcgcggttgagcccggcgccgtcatcggcgatttcgatgacgatgcttccggagtcgtggtaggcattcaggctcagatggcccttgctcgacttgcccgccgcacgtcgcgcatcggcgctttcgataccgtggtccatggcgttgcgcagcaggtgcatcagcgggtcgccgatcttctcgaccacggtcttgtccagctcggtctccgcgccgctgatgatcagctcgatgtccttgcccagttcctggctgacatcgcgcaccacgcgacggaagcggttgaacgtgtcgccgatggggatcatgcgcaggtgcagggcaccatcgagaatctcttctaccagcccggacaccgtcgaggtggcctcttgcagcgggtcgttgttacaggagcgcgccaacaggctggcgccggcgctggcgatcaccaattcgccgaccaggttgatcaactcatcgagcttgtcggcgttgacccgaacataactgccgtcgcgggttttcgcctcgctgttcgctggctggcgctggggcgacgcgggggccaggcctggctcggcttgcgcgatcaggtcactgccgatggcgacgctgcttgcgggcgtttcgtcgacggcgcggatgtgcacgtcacagtcgtcgcgcacgaagtcgaacacttcgttgagcgtggcatggctggccgtcgaacgcaggtcgatctcaaagcccaggtagcagctttccgggtcccagtgctccagggcggggatgctgtcggtcagggtggtgacctgcaccatttgccccagcgtatcgaggtagcgcaggaacgacagcgggtccatgccattacggaacacgtccacgccgaaacgcagagaaatatgccaaagcacgtcggcccccgtgtcgtcgtgcaccgcagcgggtacgacgtcggcggtggcgctgcgcagcggctggtagtcgctcagcgcctcgcgcaaggtctcaccgcgctccagcgtggccggggtcggcgtctcaccgcgactggcgaccacgtcgatcagttcaagcatgtggtcgccgcacttgagcagcagcgcaatcaacgccgcgtccaccgccacactgccatcgcgcaggcggtcgagaacgtcttcgacgatatgcgtgaaccccacgatcgacgcgaggccgaacagtccggcggatcccttgatagtatgcgcggcgcggaaaatcgcgccgatggcatcctggtcgccggggtcgctttccaattgcagcagggattgctccatggcctgcagtagctcgcgcgcctcgacgatgaaggtctgcagtgcctgatcgagattgatgctcacctggactttccttgtcgatcaatgaacgggacagtgccgcttaaagagcggcgctgcgacacagttggagcgcctgcatgactgcctggctctggccggtcacactcaaggcggtgccggcaatgccggcttcacgctggatgacggccagcaactgcaggccggcaccgtccatttccgtcacctgggacaggtccagttccaggcgcggcgccgcgcccatctgcggccacaacgcgcccgccagttcagcgacggtgtagatcgtgagttcgccgtcgatgcccacatgggtagtgtcgtcgattgtttcgtgagtgatcggcatgttggcctccctggcgccgggtgtcagggcaggatcaatttggagaccgccgccagcatctgcgccggctggaacggcttgaccacccacgccttggcgcccgcggcctggccttcggccttcttcgattcctgagactcggtggtcagcatgatgatcggtgtgaacttgtagttggccagcttcttcacctccttgacgaaggtgatgccatccatgttgggcatgttcacgtcgctgatgatcaggtgcactttttgcccggtcagcttgttcagggcgtccttgccgtcgctggcctcgatcacgtcgtaaccggcgcttttcaaggcgatgccgaccacttggcgcacgctgctggagtcgtcgaccactaatacattcttcgccatgatgtgctcctaaaagaaagtgatgtcttgggaattcgactgcactgccgcctcgccacgatggaggcgtcgttgctcgtcagtggcataggtggtttccatgcgcgccagccactggcgagcgtcgatgtccagcggctggtccggggtctggttggcctgttgcagatggtcatgcagggcgtgcatgttgtcgcgcacgtgactgaggatctggctgacccggtcctggaattgcaggttgaccaacacctcggtcatctcatcgcggatgccgtagctttcctgtttgagcaggtcggcggattcggccagacgcccagtgatgttctggaagcgtgtgagcaccatttgaatactgttttcggactcggccaccgaatggctgtcctggtcggcactgctggacgcggcctgcaccaattgagtaatggcgttattgatgatgtcgaccttggccgacatctgctggcccgtttcactggatttgctcgacaggctgcgcaccgcatcggccaccaccgcgaagccgcgaccggcctcaccggcgcgcgccgcttcgatggccgcgttgagggccagcaggttggtttgtgcggcaatcgctgccacatcagcggccatggtacgcagttcgcccgtataggcggtcaagctgcgcacctgcgccagggtctggtcacggctggtttgcgtggccttgagcgaattgatcacctggctcaactcgctgtcactgcgtgccagcacctcaagcgcgccgtcagcggcctgcccgtccagctcgccggccgcgtgctgcgacgcttgtaccgtttcctccaagcgggtggcgatcccggtgaaacggttcaccaggctcacaatcgcttcctcggtctgatggcgcgagctttccacctgcttggcccagatgggcatggcacccagcaatacctcatcgagctgtgcacgcgaggccaagccgttatgcgcgtgcgcactcgactggtccgcctgcgcctgcgcaatcgctcgctgcagcgcgttgcgctgcgaagccgcgctccaggcacaggcaccgaggccgatcatcaccagtaccgtgcaggccagcagattggccggcgaagtggattgcacgagtatccacacaacggccggcacgaccggaatcaaggcgaaccaacggaaacgaggataaacgggaaggtgcgtgcggctggatgggcgctggggcatgagttcgatccttgaacagtgttgcggatgtaaacgacatagaggctatccgcccctagcggctcaactttaggtctgttgagtaccttccgtctggtttatgaccggtgtgtgactgagcacggagttaagtgtaggtgacgcccgctgacacgcttaggctgcttgcaggatcgtacaagcgccctcgatccctcgttcgctaacctgacgactcttatccagcagagtctccgacatgtctcagtcacagcccccgacacaccccataaatctcatccaaaaagctgacctgatcgaccaaccatggagcccacgcgtcgttgcggagatgaacgactaccagttcaaagtcgtgcgcatcgaaggcgagttcatctggcactcccacccggaaaccgacgaggcctttctggtactcgacggtaccctgcgtatcgaccttgcagacggcccggtctatgtcgcaccgggcgagctgtacgtggtccctcggggcgtagcgcaccgcacagccgccgaaggcgaggccaagctgatgatgatcgagccacggggcatcttgaataccgggcatgaaggtggggagcttacggctgtgaatgaccagtggatctgaggctggcgtcgcctgctcgctcatactgttatgagacactcactccacttatcgtgtcagccttgaacaggtcaagacgcggccgccccggacgagcggccggtagggttatttcagcaaggcaatcagcgtgcagaccaccgtgatcgccagcgccggccattgcatcggcatgaaaaagaagtggtggcgcacgccatcggcgtgcggttgtcggttcagtacaaagcccagcacggtgttgatcgctgaccccgccccgaagccgagcaacacctgcatcagggatgtgttgccgggtttgacgctggggtcgggccacagccacattaatagcagcaccatcgccaccggtgtaaacaacgtcagccagcctgcgccgcgatagatcatcgattaatcctcacaacttgcgagtctgtgggggcctgggtgggaagtgagtgcatgcgtttttccgtccttgtaatgggtcaagccttgcaccgcccccgtctggtggccgagtgcatttggcacggcgagttggaacatggctaattaatattgttccttgggcaaatgacttcacaggggcgtgagcctggcagttcgcggtattggggtcttttttttcctgcgtagaacagtgatcatcgccctcccccaagccctaggaaccaagaccatggagttgacgctggaagctgttgcgctttttgcactgaagctggtgcacgagacggacggcggcagcccggtcttgcgggacgatccggtgatggatgggtatgagcgggaggtattcgggctgctggtgcggcagggagacttggcggccattcaatccaaagtcgcggaatgtgtggatcaagcgcttgaagcactgggcggggccgatacggtgatggggcgcgagttgcagcgcttggcgctgggcgtgcgccaagcgtcgacactggatgaactcaatgccccgctcaacgcactcaaggattacctgaaagccattctgtaacgcgcggttcagcgccgcccttccaccgccatccgcaccgccaaccccatcaacaccgagcccatcaaccagcgctgcaccacctgccaacccggccgggtaacgaaaaataccgcgatggaacccgccagggtggcaatcaccgcgttgacactcacgctgataaaaatctgcgtaaagcccagcaccagggattgcgtcaacacgctgccatgaccgttcgggtcgatgaactgcggcagcagcgacaaatacatcaccgctaccttggggttgagcaggttggtcaccaggcccatggtgaacagcttgcgcgggctgtccttgggcaagtcccgcacctggaacggcgaacgcccacccggccggatcgcctgccaggccatgtacgccaggtacagcgcgccgccgaaacgcagcgcgtcataggcaaacggcaccgccatgaccaaggccgtgatccccaaagccgcgcacagcatataaaccaggaaacccaaagccacgccccccagggaaatcaacccggccgtgcggccttggcagatcgaacgggagatgaggtagatcatgttcgggccgggcgtgagcaccatgccgagtgaaatcagcgcataagccagccaactggacagttcgggcattgttgggctcctggggtgttaggttgtcagcgaaatatttggtcaaggttgtcggcttggccgccatggtagggcgttcaaaatgcgcgcgttagatacagatccgcgagcaaaacggcatacacccaagaggcaggacatgatcgacttcaacaacaaaggcttcttcaagctcaagcaaaacaacgaatacgccgaacgcgtcgtcgccctgctgctggacggcgaagaagtgatcgacgcttacaaggccatgcgcgacggcgtggtgttcaccaccaagcgcatcatcgcggtgaacgtgcaggggattaccggcagcaagaaggatttcacttcgctgccgtataaaaatatcgtggcgtattcggtggagacgtccgggacgtttgacctggattcggagttggagatttatttttcgtcgctgggcaaagtgaaattcgaatttaccggcaagacctcgattgtggaaatctcgcggttgatttccaagcacctgctggcctgatcggcaggcaattgatttagacggcggtcccccaatcaaaatgtgggagggggcttgcccccgatagggccccctcccacaccatcaaaccacagccctacacaccaacgccttccccttcctccaccgccccattcggcaacatcccattcgccaaatcatccaccactgccttggccatctcccccaaataatgcgccgcccaggcatagcgatctgcactggaatccatggctgcatccaacgccagcaacttggaacagtgcaacagctcggaggcatgctccagggcatcacggatgggcacgccggaattgacgcggaatagacggtggaggttcggctgcttgccgcaggtggagaaggtgatgatgccgagggtgttgttgaggggtgggttgatcattgggcacctccagagtggttggagatgcttacgatggtattgcgtgggtacgacctgtcagaaacgctcattggcttaactcctaatgtagataagagccgccacgttcgtttccaggcgagtgggtggcagctatgcgcaggctggaaaaccgggacaataggaacccggcagacccgaaggtctcccgcgcacagccgccataacacgaatatgctggcacaaaaacaccagcaatcgtgataaatagtggcacctgtgcgctattgttccacgggtttccaggcccgatcgccgaatgtcgacgacacgccaaaagtagcctaaagactgattagcggaaaatcggctttgtggctaaacgtgtctgatgaggcagaaaaaaattaactgaaatcaaaagccaataactctttattaaacaatataaaagcagtcgacgagaccagcacacatatgaaacctgagcaaaagacattaaatttagattcattttactcggacatactaaaagaggacgaattaggagcagccatccgcacgcacatttatatagagtcagctcttgagcagctgattgaaatattagtttcagattatgagcacatcaaaaagatgcagctcgacttctctcaaaaggtaaacctagcagttgcggtaggaatgccaaaagatttcgccccagcacttttagcagtcgggacgattcgaaataaatttgcgcacaggattgacacaaaaattgacaaggagaaaacaaacaacctttacaaacagctttcacccgaccagagaagtgcgatacatgcatcattcaaaaacacgctaaaaaaaacaccactagatcaagcgaggaatctttccgacatcacacctaaagagcaatttgcaattttatctgtagcattattaatgcaaatcctcaccctgatacaggcacacgatagataaaaaagctgaattgattggaaccacacagtacttttattaaaagcgtgatcttagcgagaactgcaccgttcgtatgaaatttacagcatcaactcataaggccccagcaccttactagtctgcaccaacccctgccgcatcaacatctcaagataactccccgcctccatcggaggccgcttcaacgcccgcctctgcttctgcgccgctcccagcaccgccgcctgatccagatcccaaagatccgaaataaagtcatctggatgcatcggctcaatatcataagcagacagaatgtgcgccgggaaatctttcaaattgaacgtcacgataacctcagctttgctccgaattgccgccgccagcacgtgacgatcatctggatcgggcagatccagactcgagcacagatcctcatatcccgtcaccaaagcgtcaggtatagccttgtccatcagcgctgacgtgcaattcacttgctccgccgtcagatcgggccggttcttgagtacgttgcgcttccactcctcatgaatctggcgggtccatctcgctcgatacagccctgacaagccaagccacatcagtaaatcccgaagcgctgccgggtaaagaacacaagcatcgtatacagcagtaaaaggcgaacacctcatccgtcataccccattcccaactcctgtgcctgttgtgccaacgcttccatcgcctcctgactttcctcatccctccgctgcttgaacgccatcaagtccgaaaaacggatgcgtcgatgccgaccggtttttgtaaagggaatagcgccctcctccagcatcttgaccaagtgcggccgtgaaacgttaagcaggtcagccgcttcctgcgatgtcaattcagcgtgcaccgggactaccttgaccgcattgccgatcgctaactcgcccaaaatatcgaccagcaagcgcagtgctgaggtggggagtacgaggctgtgaggcttatcttctttgtcgaagatgtcgatgcgctgggtttcaaatttggtcgacagcagcgaggccagctcacgctggccttgtacggcagcttcgacttccttttccagaggaggaatggttttagggaggtgattggccatcatgatgcaactccggtgtttcgaaattcagttgagaccaaacctaaacgaaacaaacgaaaatcgcaatattcgaaacaccaacatcgggcgctacccaataggctcctacttccgcttggtaagctcatcacctccttcgcagaaacctgcgataccaacccactccacccgccacggccccgacaacaaccaccccattccccaccagccaaagcccaaaattccggctctgctccgcatccccctcataaaacggcccaaaatacgccgataccaccactaccacaccgttaaacaccccaagtgccaccgcaaccaccagcacaacaaacaccacccccttaaccactttcaggcaaccttccaaaaccagatctccctggactcgtgataatccgagaacgtcccttcaatcgaaaaccctagttgaatacgcggatagctcaaccagtccgtcaaccgccgcccgttccataggtcgatgtgatcaccactgcgattaccaaacgtttcgtttccccggcgccaaaagtctttgaagaagatgatgccttgttgcccagtcaactcatcctcgaagttttcgggttttatctttttcatgcttcgtaaaccggaagtgacgatacggcttaatgcgttggccatttcctctgcggccagtatgtgcccctcgcttttgggatgctgccaacaatagcgcacgctgcttaatctgctcaggtcaacgccagatctacgcagtgccacttcaagattgatcgcgcattgatcactgaaattcttggcgccgttggttctgcatggtgctgcgtcgccaaagatttccgggtggtttttccatagggtgttgaatgtcagcattctgcttttccatgcgtattttttccgcgaccgtagcaaacacggtgcggctgaagagaactccagagcgaatccagaaaggtcctacgcaagaactagacctggtttgcaggacaacacgcacatacctgtcgcgcgtggatcaaggagctcaaacgctcgccttctagagcgctgacaacctgttgccttttcccacgccagccatcgaacaaagccaatacctcccatcgctcccccctcgtaggctcacctcctcgcacaaggaagtgagcccgtcatgccagaacgcttttacccacccaccgaagaagagttacgcaaacaacgcatcctggcaccgcagccatcgcgtgcgccgtattcgccatcggttgattttttcgagccatcccctgtcccagcccctacgcgagccagacctcccggctgcgtcttcatgaagccttgccaattgcctgacggcatcactcattacttcaacccggcagggtatgtgccgttggagctgatcagggagtacggccacttaagcctgctgggtgggcgtgaggtggacagcaggggcgcggttgccttgcgcaagatcggcggcagcacattgcccgctggcttggggcagttggcgttgcggtcggcggtttgggagtcggcggcgactgccgttggatcggtcgccgggggcctgctgacgggtttggtggcgctggcctggccgtcagagttgggtgatagcgcgctctacaacgaggagcagttgcgttcgatgcaacgggcgcggtcgcagatgcggttgcatatcgagcaacgcgaggacggcacgctcaaggggtatgggttctacacgggcaaccatgccgattggcagatgattgatgtggtgcagtttcaacagcgtaacgatcagtttgtggcggatttgggtgagggtgtggagctgatctggacgcccgccgttgatcccagtgacacgctggggattccggccttggaggctgcgccgcaagcgccggtgatctggatttatccgccgacggagaaagcggcgcagattctggtgaacccggtttatccaccggagtatcgggattttattctggtgttcccggtggagtcgggggtacggccgctgtatgtggtgctcaacaagccaaggaaaggttggcttacgtgaacgttggatagacgcaaaaggaagaaaaatatttgaatgggattccaagaaagccgagctggaagtctatcgaaacagtgacttggaacacctcggtgcatttgatccttataccgccgagcgtcgaggaccggcggatccgaaacgtcgaatttatagataaagaggattttgaaatggtgatgaaaatcagactgcgatggtacgaaaagcacagcaatgacttgaaagcggatgaatactcagcggatatcgcagacccagacagtatttttgaagcattgggcttaagcgaagagaccgcgatatatgccgacgtattcaacgtccaacccaattggataacgctaattcagccgtacttccagcacgtgatccaacccaaccacctcgactaccaaatctccttccgctaccaaggcgcctggccaccgcctccaaaacagtccaaaaaggcgtcgtgatgcaattatagaacagaagagaaagacgcgaaaacgtaacggcggcggtcttcgggaacgttggaaggacgcgaaaggaaagagactttttgagtgggattcggaacaaggtgagctggaagtccaccgatacagcgatgtgaaacacctaggttcatttgacccatatacgggagagcagcggggcccggcgaaagatgaacggcgaattacaaaataaacggagagtcaatcatggtgatgaagataagactggaatggtttgacaaacaaaccgaaaacttagaggcggacgaatactcagcaaacctcaacgaggatgatggcattctcaaagcactggacctccatgacgagcctcaaatttatgccggaggattcgatgttctcccaagttgggtagcgattctccagccacatttccgacacgttatagagcctggccttttcgactaccaaatctccttccgctaccaaggcgcctggccaccgcctccaaaacaatccaaaaaggcgtcgtgatgcaatgaaacccacatcgcaaaaacccctcctctaccgctcagtcaacacccgaacccatggcgtgcgccacggcagttgtcgcgcctaccggtatgagcggcacaccaaaggcgaaaaagacaaacaatcaaaccgcgggtcgatgcatagccatcaacggcatggctttgattacaccccgctattccgctttctcctctccaaagtcggccacccatgggaccaggtgttcagcgaagccaacgcccgcctggatcgcccagagccggtgttctggatggtcgcgcaacatgaaagcgacaagcaggattacgtgagaacggatgaaaacagctactacagcggcttgtatgtcgacgaaggcggcctgctgcaaaaggtcaacccacagctgacgcccgagcagatgaaacccttctgcaactgcagcacccacaccttcaacggtgtggtattcccgcagggtctaccacacaacggctaaccctcaacccgacttaaccccactccccgcctcagccaccggtacccgattcgccggatcggtcacgtcatacacatgctgctcacaccccgagcccttgaattggaattccaccaggtacacctttgccttctccgggctgaacgtattcatcactggcccgcaggtgtagtagtaaccggtgcgggtatcgttcgcgtaccccgataccgtgagtttcttgccggggtcggcctggatttccagttgtgggaatcgcttgaagcccgcactggccacggtctggttgagcttggcgatccagttgaagaccttgccttcgccggtgtccatcacggtgccgagggcttccatgcgtgggtcggggtcgccttcgcggctgatcgagaagtcgacggcgggagtgccgccactggacttcatgatgactttggcgtgttccgcatccacagccacggttttctggcgaaactgaatgccgtccttgagcaggctgggcgatgagtcgcgttggttggattggcaggcgcccagggccagggcaatggagagcagcgcgattcgcttcacgggggatgtccttatcggggaagagtgtgatgactggacccgaatttaaacggattgttccgcttcaggagggatgagcgatgccgccgttcaggcgctctcaaacaccaaccgcgcgcacaacccaccctgcttgcggttatgcagcgccaaccggcaaccgatcttgcctacgatcatctgcacaatcgccaaccccaagcccgcgccattggcattatcccggctgtagaaccgttcgaacaggcgctccatttgcgcctcatcaatcccggggccccggtctttgacactcaaacaatgagcccccatcacgactgtcacttcactgcccgccggggaaaagttaagcgcattggtcaccaggttttgcagcgcaatcgccagcgccacgggctcggtttcgacccagcagtcttcgttgccttcgagcaccagctctacgcctttttccatggccaggggggtcaattcggcgagttcttcgcgcaccagttcagtcaggtgcacacggccgcacacggggttgtgcaactggggttcgatgcgcgccatggtcagtaactggctaccaatacgggtagcgcggtcgacgccattgactagaaaatccaaggcttcgcggcgctgttctccagtgacggcgctttgcgcgttctgcgcgtgaatgcgcaggatcgccaggggcgtgcgcagttcatgggcggcgtcggcgatgaagcggcgttcgcggtcgagcagttcatccacttggaccagcagccggttcagcgcggtctgcatgggttccaggtcggtcggcagtgggttgaggtgcagcggttgcaaggtttcggtattgcgtccacgaatcgacaacaccatggcgcgcagcggtttgaagccccagccgatcaccagccagatcagcaccgtcagcagcggcacgccgatcagcgtgggccacagggtgtggcgcatgatgcgctggatcacgtcctggcggatgtcgtcgcgctcacccacccagatcaacacgccctgttgcgggtcggtgaggagaaaggcgcaccagtcgttgccgttgtccatcaggtcatgggagcccagggtggtcggcggcgccgccagcaccggcgcttcggcggagcgcaccagcagctcacccgcgctgttccagacctggaaggtcaggcgggtttcatagggatgggccacgccgtcctcgccgacgcggctcatggcctggtcgaacgcctggtacaaccgttcccaacccgcgtcctcagggtcacgctggcgcagcacgccttgcagcaggcgcgcactctgggcgagttgggcgtcgtagacttcttcgatttcgtggtggctgtcgcgcagtaccaaccagctgatcaaggcatcgcccaacaggatcaacaccaacaccgggatgaggatgcgcgcgcgaaccgaggtcatgcggtgagtaccagcacatagccgacaccgcgtacggtgcggatcaactcggtggataactttttacgcaggttatgaatcagtacttccaacgtgttgctctcgacccggtcctgccagccatacaacgcgcgggacagccgctcgcgggtcacgaccttgccggggcgcaccatcagttggtgcagcagttggtattccatgggggtgacgatgatgtcggcgtcctggtaacgcacctgctgcgtggccgggtcgaggctgacgccggcgtgttccagcagcggttgcgcgcggccctggctacggcgcaacagcgcacggacacgagccttgagttcttccacatcgaagggtttgaccaggtagtcgtcagcgcccgcgtccaagccggcgatgcgttcggcggtgccgtcgcgggcggtgaggatcagcaccggcaagtcgtgttgctcggcgcgcagttgctgcaacaggtcgaggccgtcgaggcgtggcaagccgagatcgagcagcagcaggtcgaacgactccgtgcgcagggcatgcagggcggcaacgccatcttgcagccagtcaagggtgtagccttcggcgcccagggccacgcgaatacccaggccgagggcacggtcatcttcgacaaggagtaggcgcattacggattctctgtaggaaacggcgaaatcatgccgggtttcaccggcgcaccctcggcaaagatgttactgctcgttgccaactaagcttgcactaaggttggttttgcactgtgcaaactcctacgtttgctgagagcttttccatgcgcaaaattctcctgctgtccctgattctcgccagccccctggccgtcgccggcccgcagtgcaccaccgccgaacgctcgcaatggcaggacgaaaaagccttccaggacaagctcaaggccgaaggctacaccatcagcaagttcaaggtcaccgacggcaattgctacgagatctacggctttgacaaagacaagcgcaaggtcgagatctaccacgacccggtcaccggcaaagccgtgaagaccgagatcaaaggctgatgccgggcgagtccctgcacctgtgggacccgttggtgaggctgtttcatctgtcgatcgccggggtctttgtcgccaattacttctttaacgaagcaggcgacgactggcatgtctggctgggctactacgccatggcctggttgctggtacgtggggtgtggggatttgtcggaccgcgtagcgcccaatggacggacttctggccgacgccacgacgcctgactgcccacctacgctcgctcctcagcggtcggccacagcatcgcctgggccattcgccgattggcgcgctggtgatgctattgatgttgctggcgctgctgaccctcggtatcagcggttttctgatgcaggaggtcgacgccttgtggggtgccgattggccgctgcaaatccacgagactgcggccaatgtgcttttgggcctggtctgcgtgcatgtgctggcagcgatcgttgaaagcctccagatgcgggacaacctgcccttgtccatgctcaccggtcgcaggaagcgcctgccggatgaacgtgcgccgtaattctttgacccacaggttctctatgcgctccgtcctcctgatcgtcggcctgctcgcggtgtttttcgccgcctggcaaagccatccgccccatgtactggcaccgtttgcccaggtgagcccgaacaccgccaaagtggcatcggccccgcagtacaccagccggtttgtatcgacacagctcaccgactttgtgcattcctcgtccgtcaccgccctgcccggtggcgacttgatggcggtgtggttcgccggttcccgcgaaggcgccgccgatgtgcaagtgcgtaccgcgcgctttgacgcccacaccggagaatggggcgccgagcaggtactggccacacgggaaagcacccgcgacggcacgcagcgctatatccgcaagctcggtaatccggtgattgccctggcgccggaccagcgcctgtggatgttttatgtgtcggtatcggttgggggctgggccgccagtgcgatcaatgtgatggtatcggatgacctgggcgccagttggtcggcaccgcggcaactggtgacgtcgccgttcttcaacatcagcacgctggtgcgcgccgcgccggtgttccatgccgatggctccatcgggctgccggtgtatcacgagttcatgggcaagtttgccgagtacctgtacttgagcgccgacggggcggtgatcgacaaattccgcatcagccgcggcaagcattccctgcaaccgactatcgtgccgcaggatggcctacgcgccgtggcgatgttgcgttacgccggcgacacccaccaccgcgtgctggccagccgcaccgaagacgccgggcagacttggagcgagccctacccgctggcgccagccaaccccaattcatcgctggcggcggtgggcacgcaggatgatggtttgctggtggctctcaatgacttggaggacggtcgcttcaagctcagcctgtatggcaccgacgcacagctcacacagtggcgcaccgtggtggaactggaccagtcacccgacccgctcggccaaccgttttcgcccgaggcctataaagcaatcatcggcgagggcttccgcgcctccagcggtgcccggcgcctgccgctggagcagcgcttcctcagtaacctcgactaccgcgtgtgcaaaccccagggctgcgatttcgaatacgaatacccgtatttcagccgcagcccggacggcatgtaccacctggtgtattcgtggaataacacctttatcaagcatgtcagcttcaacgaagcttggctggcggagcgtctgtgatggttgctgtgtggcaggcccatttgagttttgtgttgctgggtttcgtggcgctgagcgcgctgcgcttcaccgaagcgtggcggccatggttgctaccggtgttggtggcggtgagttttatcccggtcaatgcgctgcccctggcggcgtatgtgcgcagttttactgatgacttggcgatcagcaccttggtgttgttggcatgggtggggttgtgccggctgggcgtggtgcgggcgctggatcgaccccatcaggtacagatgctgctgctctttgggctgctgagcctgttgctgtaccccgccaccttgggcctgacctatttcgatccttatcgttggggcttcaaccctcgcccgatgattgtgctagtggccgtggcggcactggtgatgctgtggctgcgcaacacgctggcggtgtggatgttggcggtgggcacgctggcgttcgcgctgcggctcaaggcatcggaaaactactgggactatctggtcgatccgctgctgacggtctactgcgtagtcgccggactaatgcaattcaaactgtgggagcgggcttgcccgcgatagcggtgtatcagttaccgctatgtttactgaaccaccgctatcgcgggcaagcccgctcccacatgggttctgcgtcgttttaaagaatgggaaaaataatgagtgcgttgcaatcacgccgcctgcgctacggcgtgggcgcgatcgggttggtgtttgtgttgctggccgcgttacggctaatgtttgtgctgggtttttccggccttggcttcagcactccggccctgctggaaaccgtgggcatcggcctgcggttcgacctgcgcctggcggtgctggtcctgctgccgctggccgtgctggcatggctgccgcgctggaacctcatcactctgccggccctgcgctggctggcacgcgggtatctgacggcagcgctggcattggtcggcctggtgtacatcatcgacttcggccattacgcctacctcggcgtacgcatcaatgcgacggtgctgcgctacctgcaagacgcacagatttcacaacagatggtgtgggaaacctacccagtgctgtggataactgcctgctggctggcggcggtggcgctgtgggtctgggcgctcgtctgtctcgaacgattgacactcgaccgtgcgcccagcgccagcggcaagctgtccttggtcgccgtttccgccattgcagtggtcggcgtgctactggcgctgctcggccgcgtcgcccatctcaatctggagaacccggtgcccttacgctggagtgatgcgttcttttccggcaacagccaagtggcggcggtaggactgaacccggtgctgtttttgtacgacaccctcaaggtcggccagtcgcagtttgatgaagcccaggtgcgcaagcattacccgcagatcgccgactacctgggagtcgaccaacctgatgcgcagcaactcaactttattcgcagccagagcgtgcagccgtatcgcctggcgggcgagcgcccgcccaatgtggtcttcgtgatgctcgaatcccttggcactagcgccgtaggcgcctacggcaacccgctcaaccccacgccgaacctggacaaactggccagccaaagttggttcttcaagcacttctacgtgcccgtcaccggcaccgccaagacggtgtgggcgagcatcagcggcgtgccggacgtgacccgccaggaaaccgccacgcgcaacccgctgattacccggcaacacacgctgatcaacgcgttcgagggttaccagaagttctacatgatcggcggcaatgccggctgggcgaatatcaacgcgttgatccgccagagcatcgacggtgtgcagctgtatgaggaaagccactggcgttcgccgcgggtggacgtgtggggcatctccgaccttgacctgttcaaggaaggtgacgcgttgctgcgcgcggtcccgaaagaccaaccgttcttcgcctacctgcaaacctccggcaaccatcgcccctttaccatccccaggcacaacgatggtttccaggtaaaggacgtgaccctggagcacgtccaggccgccgggtcgcgcagcgtcgagcagtacaacgcggtgcgcttgctggactacaacatcggccgcctgatggaaatcgccaaggccggcggctggtacgacaacagcattttcgtgttcttcggcgaccacaacacgcgcatcagccagatcccgcacatggcgccggcctttgagcagcttggtttggagagcaataacgtaccgctgctgatccacgcccctggcctggccccccgggtgatcgaggaggccgtggggctggcggacctgttgcccaccgtcgccggcatggcgggcataccgtttcgcaatggcgcgctggggcgtgatatccagcagccggcgcccgaaggcgaacgcgtggtgccgctggtgttgcgcgaaggcaccttcccgatcatcggcggcgtcacccggcacttcctgctgcagatgcaacacgacggcagctcgccgaccctgcatgacctggcctcacccagcccgcgagagaacgtagccgcgcagcaccccgaagagtttcaacgtttgcagggcttgacccgagggctgcatgagagcgcacggttgatgctgttcagcaacgtacgagagtgattattggggctggaaagtttcgaggtaggccaggatgtcggcaatcttgtcctggtcgctgatgccccaaaaaatcatccgcgtgccactcaccaccttcttcggcgcttcgatataggcggcgagcttgtcgcgggtccagaccacaccggagtttttcatcgcgtcggaatattgatagtccgtggtcgtcccggcgggcctgccaatgatgccgttgagctgcggaccaaaaccgccgcgcgcaccttcgccgatgctgtggcagccgccgcaggtcttggtgaagagtttgccgcccgcctcggcgtcgccggccgccaaagcggggcttgcgttgagggccagggcgagggtgaacagggcgtacttcatggcagactccacagcagttgtagcgggcgattatgcctgtttgtctggagcgcatgctcatccagattaccgtttcagtccttggggtgcgcagcgccactatcctcccgccccccttgcgcaaatgtgcaacctagaccctctgaatgaccatccatcgcttcatacatatccaatcgaacctatgcagctgtgttctactccacctctatgaaccctgatggtggagtaaggatcatggctcagccatcgattttggtattggaagacgacgaaatcattcgggcgttgatggtggatgtgctggaggaattcggcgcggtggtgacgtcgtttccttcggcggatgaagggatgatttacctggagcggggcgacgatccggtggacctgattgtcagcgatatccagatgccgggtttgctcaacggctacgatctgagcaaggtggtggcgcatcgttggccgacggtgccagtggtgttgacctccggtaatacgaagctggcgacacagttgggcggctcggtgcggttcctgcccaagccctggagctccgaacatttgatccaatgtgtgcaaaccgcgctcacccagcaaggtctatccatgcattgatagcgcttcaacatcactcgaaccgaacttcatggcgggcgctgtggtcattgatgaagcaaggagcgacttttctgatccgctggtcagccttttcgccttgtgcgtacagctgcctgccttgagttgtgtagaattgtcgcccattaaaacgcgtcattcatggccgagaggcccacagttcgagctcactgaatgcattcacaggcccatgacgttggtgcgccctctttgctggaaacgttgcgcacaggcacggccctgctgcatgtggcgttggaaaagcgcctgccgtttttctctgagcgcctggatgccgattggtatcagcgcttgcttgaggcgtactacgggttttatgggccgatggaagcggcgttgtacgaatgcgatttgatacctgagggcttcgaccaggggttacgtacgaaaaccccgacgctagtgcacgatctcgatgcactgggcctgaatgaacaggctatcggcgccctgccccgctgcgccgaactcccgaatctcgacacccccgccgcctgcctcggagctctgtacgtgctggaaggcgcaaccctcggcggccaagtgctgcgccgggaaatggctcagcgcctgagcatcaatgccgacaacggtggagcgtttctcgatgtatacggcgccgaaaccggtcgacgctggaaagactttctcgattacctgggccgcctgccgctggatgcccccgccaaacagcgcgcggtagaggcagcccgttcgacattccgctgctttgagcaatggctcgacagccaggaggtactgctatgaaacccgaagattttgaagagctgcttgccaactgtgccaacgagccgattcgcttcccgggggcgatccagccccatggcgtgctgctgacattgtccgagcccgagctgaatatcatccaggtcagcgccaacgtgggcagcatgttcggccatgcgcccgaggcgctgctgggccagccgctgcacacgctggtgggcgccgagcacgcccaggccgttgctgccatggccgaaaacaacacgttttttgacgcgccaccgctgcacgtttcctttaacggcgcagagttcgaaggcctgctgcaccgccatcagaatgtgctggtgctggaattcgagccgcgtctcaaagacttccgtccacgggcactgaacgggcgcaccagtgaccagggcaagatgctgcaacgtttgcagtcggcgaaaaccctgcaagcgctgtacgaaatcagcgtgactgaaatccaggccatgaccggctacgaccgcgtgctgatctaccgcttcgaagacgaaggccacggccaggtgatcgccgaagcgtcagcgccgtccatggagctgttcaacgggttgttcttccccgcgtccgacatcccggagcaggcccgcgagctgtaccgcaccaactggctacgcatcatcccgaacgcggcctacgagccggttccgctgttgcctaagctgcgcccggacaccggccagccgctggatctgagctttgccaccctgcgcagcgtgtcgccgatccactgtcagtacatgcagaacatgggcgtgttgtcgtccatgagcatctcgctgatgaagggcgacaaactctggggcctgatcagttgcggcaaccgcgagccgctgctggtgccgaacgacttgcgcactgcctgccagaccatcggccaggtgctgtcgctgcagatcagcgccatggaggccctggacctgagccgccagcgcgaagagaaagtcgaggccctggcgttgctcgaccaagcgatgaagcgctcggcagagaacgtattcgacggcctggcccagcaaccgcagttgctgatggacctgaccttgtccggcggcgtggcgatcatcgaagacaaacaactgcaccgctacggcaactgcccggaaccggcgcagatccgcgccttgcacaagtggttgcaagcgcgcggcgagccggtgttttccagccataacctggtgtcggtttacccaccggccgctgagttccaacaagtggccagtggcgtgttggccatgagcctgcctaagcctgtggacaacggtgtgctgtggttccgcccggaagtgaaggagaacatcaactggagcggcgacccgaaaaaaccgctggacctggaaaactctgacgccggcctgcgccttcgcccacgcacctcgtttgaaatctggaaagtggaaatggccggcatctccaccaaatggagccacggcgaccactttgccgccaacgacctgcgccgctcggccctggaaaacgacctggcgcgccaggtgctgcgcgagcaacaagcggtgcgtgcgcgtgatgagctggtggcggtggtgtcccacgacctgcgtaacccgatgacggtgatctcgatgctgtgcggcatgatgcaaaaggccttcagctccgatggcccacacacctcgcgacgcatttcctcggctatcgacaccatgcaacaggccgccgggcgcatgaacgtgctgttggaagacttgctcgacacctcgaaaatcgaggccgggcggtatgtggtcaagccggtggcactcgacgtgacccagatcttcgaggaagcctattccctgctggcaccgctggcgatggataagggcatcgacctgtctttcaacgccgagccgggcctgcagatcaatgccgacccggagcgtctgttccaggtgctgtcgaacctgatcggcaacgcgatcaagttcactccgcgccagggcaacatcggcatcagtgccatgagcaatggcgaagaaattgtgttctccgtgcgcgactccggcgaaggcattgcaccggaacaactgccgcacgtgtttgaccgttactggacccagacggaaaacaacccgaccggcagcgggctggggctgtatatcacccaaggtatcgtccaggcccacggcggcaagatcgttgccgagagtgaagtgggtcgggggagtgagttccggtttacggtgccgaaggtgatcgacgactcgcatacctgagtgggtggtttgagggctgctgcgcagcccagcgcggggcaagcccgctcacgacaaggtccccttaaaccggcagcaccacaaccgcttccagccctccgccgtggcgttcggtcagggtcagggtgccgccgtgttccagcacaatcgcccgggcggtcgagagccccaagcccacaccgcccgtgcttttgttgcgtgagccttccaggcgatagaacggcaggaacacctcctcccgatgttcagccgcaatgcccgggccgcgatccaacacgcgaatcaccacctcgtcctgtgtgtgctgcaactcgatctccggcgcgacgccatagtggatcgcgttgtccacgaggttggtcatcacccgcttgagccccaggggcctgccgaaatacaccaggcgtggcggaccgtgaaaggtgatgtcgagcgcctggtcgcggtagtcgtcgatcagggtttgcagcaactcggccaggtccagttgggtggccggttccaggcgggcgtcgtcgcggaagaattccagggcggtgttgatcatggcctgcatttcatcgacgtcgcgaaacagccgctgctgctggtcggcgtcttcgatgaattccccgcgcaggcgcaggcgcgtcagcggcgcacgcaggtcgtgggagatggccgcgagcatttgcgtgcggtcctggatgaagtggcgtaactgcgcctgcatgctgttgaacgcaaggatcgcctggcggatttcatgaggccccaccggttcgacgggcggtgcgcgaaagtctgcaccaaagcgccgaacgccgtgggcaaagtcctgcagcggtcgcgccagtcgccgagtggccaccagggtgaccagtgcggtggagatcagcaccagcaataccacgatcacactgcgtgcgccctcgtccaggccccagctgcgggcaggcgcggtgaacatcagccaggaatgatcagccagttgcatcagcagcatgtagtggccattgccgtcgggccaatcggacggttcataggcttccatagggcggatcgggccgtcgagcaggtgctcgaaggcctgttctcccgactggaaatccgggtcctgcagcacgggcaaatcaaatgctgttcgctgcgccgaccacctcacgctgaacgcgtcgtcagccattacttctgccagacgcggtcgttgcgccggcgccgacgcttcgaccacgcgcaccaccacggcgattttttccagcaggccggtttcggtgagcggcggccgtgcccaaacccccgccagcttcacgaacagggcgttgaacgccaatgcggtgaacatcgcgatcagcaccgtcagggcgatccagcgggccacggtgtcgcgtgggcggcgactcatgagcgcgtcacgctgacggtgaattggtaaccgccgttgcgtaccgtgcggatcatcgccgggcgtttggtatcgaattccagcttgcggcgtaggcggctcacttgcacgtcgatgctgcgatcaaacgcgtcgtggctgtggccccgcgccaggttcaacaactgctcgcgggtcagcacgcgctgggggtgttcggcgaacaccagcagcaggtcgaactcgccggacgacaacgggatcatcacctggtcgggcgagcgtaattcgcggcgcgtgagatccagttgccagccagcaaagcggatcaatgggcgggcgacctcccccatcggcggtcgcgcttcacccgcacggcgcatgactgcgcgcacccgggccagcaattcgcgggcatcgaaaggtttgctcaagtagtcgtcggcgcccatttccaggcctaccacgcgatcgctgagttcgcccatggcggtgagcatgatcaccggcgtcgcatattgctggcgcaggcgctggcacagcagcaggccgttgtcaccgggcagcatcaggtcgaggatgatcaggtcagccggctggcgctccatggccgcccacagctcggcgccactggcagccgtctcgaccccatagccgtgttgcaggaaaaattttttcagcagggcgaggacttcaaggtcatcgtccacaatcaacaagttgctcaccgacggtcttcactgggtggggtcgaggcgctatctaaaaccattcggcacggtccgtcatatatttcaatcgtgcaataaagcgtcaacggcgcaataaaccagacatctttgcgcaaggtcgcactgccaggatcggcctcccttttttgcggagactgtgcccatgtgctcgctgacctacccccggcatctggcccgccaggccgtgctgttgctgacagtgtcttacctgacgggctgcgcaagcccggccccggtagagcccgcgactcgctgtgcgcaggtgaattacccggtgtatgacccggccgagccggtcaaccgcggcgtgttcgcgttcaaccgtgctgtagatgactacgccctggcaccggtagcgcgaggctaccgttacctgccggattttttccagcagggtgtgcataacttcgcgagcaacttcagcgagccggagatattcatcaacgacctgctgcaaggcaacccgagacggtcggtcaataccctggggcgcttcgccgtgaacacaacggtgggcgtggtggggttgttcgatgtgtcggatcgcctgggcatcccgcgccataaagccgacttcggccagacattcggtgtgtgggggatcggcaatgggccgattgtcgaactgccgttgctgggcaccagcaatagccgggatgcagcgggcaaggtcttgggcttcctggtttcgccactgggcgacagcgataccgtgcaaaccctgggcaccatcagcctggtgggcggcaccgtcgatacccgtgcgtcattgttgccgctcaccgacagcctgcagaaactgccggattactacagcgcgttgcgcaatgtggtggcggaaaatcgggcggcctttgtacgcgagggccaggaaggcgcgacatctcccgggctggacggttgcgccaacagcgcctcggatgacttctgaaagcactggccacccgtgtcatatcttgcagcagcgcgtttatagctgactcgtttcgccctctataaatttggcctcacttcgctgcaactggcgaagtagtcctctactcaatagaaggaaacatccatgctaagcgctatcaatcacacactgggcagctttcaataccctccactgcagcaggatgatgcagagccccagcgcaggaagcgcagcattgacgtcacacactcgcaactgagcgccgccgatcctgagagcacggcagccaacgaccgtcgcaaaagcggaggtgggctagacactctgggtcaaggcaggttgctctaacccgccttaatacgaagggcagtgcacggcccttcgtactgttgtttaacaaaaccatgacattcactgggctaaccttgccggttaaacccagcgtggaacccttacctgcatgccgcacctcgacacactgcccgccctattggccggcccactgctgcgccgcctcgaaccccggcgcctggtgttgtggctggtgggaagtcgagccctggaactgaccctgcagttgcatctacccgcccaaaccctggagatcaaccttgatcattgcaaggtcgtatcggttgggcaccatgcttttatccacttgatcgatgtgccattggacgaggccctgcccctggacgtcgcgatcggttacgacgtgttgttcgacaacaccggcatcgccgagtgggcaccccacctgctgtacgccaacacccactacccaagttttgttttgcacagccgtattcatcagttggtacacggctcatgccgcaaaccccaccacagcgccgatgaaggcctgctgtgtgtcgatcgcctgctggccaacgcctccactcccgccgaccgcccggccctgctgatgatgagcggcgaccaggtgtacgccgacgatgtggccgggccgatgttgcgcgcaatacatgcattgatcacacgcctgggcctgttcgatgaatacctggagggcgccgtgatcgacgacagcgcaagcctctacgggcatcgtgccagttactaccatcgtgccgacctgctgcccgcactggacagcaacgaaaccctgcgtgaacgcttctttggcggtgtgaaaaagccgatcttcaccagcagcactgccgacaatcacctggtcaccttcgctgaagtcattgcgatgtacttgctggtatggtcgccgacgccctgggaactgatcgcgcctgaagcgccgcaactgagcacagaagaactgcagcgctacgcccgcgaacaggtgcagctcgatcgattccgcgagggcctgccaggtgtcgcccgggtgtttgcccacctgtccaccttgatgatctttgacgaccacgacatcaccgacgattggaacctcagcgcccaatgggaagccaccgcctacggccacccgttctctaaacgcatcatcggcaacgctttgctggcctacctgctgtgccagggctggggcaatcagccggatgcgttcagcaagctggtcagccaaacccaggcgcttacctgccagccacaggccaatcacctggatgccgccgcccaggatgaattgatcgacgcgctgctcaagttccagcaatggcactacgtactacccaccaccccagccctggtggtactcgacacccgcacccgccgttggcgcagcgagttcaccctcaagcaaccgtccggcctgctcgactgggaggcgttgagtgagctgcaacaggagctgctcgaccatccctcggccattatcgtgtcacccgcccccatctttggcgtgaagttgatcgaaacagtccagaaaattttcagctggtgcgggcacccgttgctggtggatgcggaaaactggatggcccatcgtggcgctgcccaggtgatcctcaatatcttccgccactcgcgtacgccgggtaactacgtgatcctttcaggtgacgttcactattcgttcgtctacgaagtgctgatccgccatcgcaacgccggcccaaggatctggcagatcaccagcagcggcatcaagaacgagttccccccacgcctgctggaatggttcgaccgcctcaaccgttggctctactccccccgctcgcccctcaacgggttcacacgccgtcgcagcatgaaggtggtgccgcatattccagaggacgccgaagcgggcgagcggttatggaattcagcggggatcggccaggtgtttttcaacgatcagggccagcctgaagcgatctaccagcacaacgcggatgggcgggtgcggacaaggatgacagcgccgaagtaacttttcccacagacataaaaaacacgttcacgccagtcttgtagaaagatcacaagtgactgtttaaatcgcacggatcatttttacgctggtgggctgtgacattgtgctgctgcatggcttcatcaaaaaaagccaaaaaacacctgtggtagaactggacaccgcccggcgtcgtaaacgcaagctatgaggcacaacctatgaacaagcatattggctccaacttcgacgactttcttaacgacgatgggctcattgaggaagtgtcagcaggggcgttgaaacgtgtcatcgcctggcagttggcagaagccattaaagcccagaaaatcagcaaaaaagcgctggccgagcgtatgcacaccagccgtaccgcagtagaccgggcgctcgatcagaacgatgcaggcatgacattggcaaccctggcaagtgcggcaagggctctaggccaacgggtagaagttcggctcatacctgactcggatgcaatactgccgattacctgaagcggcatgccagacgctcaccgggaagccggactcttcagagacagccatagccattagccatcaacctttcgccgtacatctgccctattcaaagcgtccaagccccgttgtacagtagcgccagccacggagtatcggcgtcaacaacggcaggctttgcaggcctgcccacgcaaggaacgcgcagatgggcgatacctccgacaacaacccgttggaacaggacttctctcacttcaacgccgacatgctgcacaccgtgctggagttggtcagcgacgggatctgggactggaacgccaacaccgggttcgtctaccgcaacccaggctggtacgaaatgctgggttatccccgccacgcgctggagaacagtgtattcacctgggaaagcgtgattcacccggacgactatgcccaagtgatgaagttgtttgacgactacatccaccgtcgcgcccctcactaccaagccgaataccgctgtcgcaaaaaagatggcagctacctgtggatcgaagaccgtggctatgtgattgcgcgtaacgcagacggctcggtcgcacggatggtgggcgcccaccgcgacattcatctgcgaaaatgctccgtcgagcagttggagcaacgcaatcaatcccttgaggcactggtggccgagcgcacacgcgagctgtcgcgggtcaaccagcagttgcagctacagctggatgaaaaccgctcgctggccgaacgggatgccctgaccctggtcgccaaccgctaccgcctggagaaagtgctgctggaagaatgcgaccgcgcccaacgctttcgcctgccgctgacgctgatcgcgatggatatcgatgacttcaagccgatcaatgaccgttttggtcatggcgtgggcgatcagacgctggtgcaggtggttgaatgtctgcaacgctgtattcgcccaggtgatctgttggcccgatggggcggcgacgagtttgtgctggtcctgcccaagacctcgctggaaagcgcgaaggcactggcaaatagcatccgccagcaattgagcaacagtccgcacagccacgacttcagcgtcaccttgagcctgggtgtagccgaacgcgagcgggatgaatcccccgccgccctgatagcgcgtgccgaccaggcgctgtaccgcgccaaggcggcggggaaggatggggtctctgaataacagcccccgtgttaccgaaccggcggcgcgtactggatgccgccgttgttccacagcgcgttgagcccgcgcttgatcttcagcacgctgccctggccgatattgcgctcgaacacttcgccgtagttgcccacctgcttgacgatctgcaccacccaatccttgcgcagcttgaggtccttgccgtattcgccatcagcgccgagcaaccgcgcgacatccgggttcttggtggtcttggcctgctcttcgacgttctgcgaagtgatgcccatttcctcggcattgagcatggcgaacaaggtccacttgacgatgctgaaccactcgtcatcgcctttacgcaccaacggccccaacggttccttggaaatcacttccggcagcaccacgaactcgtccgggtgggccatcttgatgcgctgggcatacaggcccgactggtcggtggtcagcacgtcgcaacgcccggcttccaggcccttggcgctttcgtcggcggtgtcgaaggtgatcggcgtgtacttcatgccgtgggtgcggaagtaatccgatacgttcagctcggtggtggtgccggcctggatacacacggtcgcgccgtccagttgcttggcgccggtaacgcccagtttgttgttcaccagaaagccgatgccgtcgtagtaggtcacgccggtgaacaccaggcccatgcccgaatcgcgggagctggtccaggtggtgttgcgcgagatcaagtcgatttcaccggattgcagcgcggtgaagcgttccttggcggtcaactgggtgaacttcactttcgatgcatcgccgaacaccgccgccgccactgcgtggcacacgtctacatcgatgccggtcatcttgcccgtgctgtccggcacgccgaaacccggcagcccgtcgctgacgccacactggatgaagccttttttctggatagcgtccagggttacgcccgcataggcgctgctcaccagacccaatgcagcggtggtgccgatcacggccaaggtggttttgaatgggttcatgcaaggctctccctgtcattccttattattcgacgccccacagcccgcgccggtttatagtgctgccgggcagtatcaacggcttcgcaccgctgccacaaacgacctttaggcaaaggctccttccgatttggaatgaagtgcatgatttcaaaacgcttgaccccttcgatgaccgccctgcaatgcttcgaagccgccgcccgccacttgagcttcacccgcgccgccgaggagctgcacctgacccagagtgcggtgagcaaacaagtggcgcagttggaggagatgctctgccacaacttgttcgaccgggtgcgccagcgtttgtacctgtcaccggccgggtcgctgtacctggccgaagtgcacaagatcctcacacaggtggacatctccagccgttacatcctcacctacggcggcgaaaccgaagtgctgcgcatcgccacccagccgaccttcggcgaccgttggctggtgcccaagctcaaggattttgcggcgcaacatccgaacatccacctggatgtgcgcaacgagctggagccgttcgatgtgctacaagccaaggcggatatcgcgtttttcttcggccagggttcatggccgggagcaacctgcatcgagctgttccgtgaggcggtggtgccggtgtgtgcgccgggttttgtcgccgaaggcagtgatgcttcgtcgcgccacaccctgctgcaatgcacctcgcgcccggaggcctggcatgaatggttcctggagcagggcctgcactcacagaacagctaccacgggccacgattcgacacgttctacatgtgcattcgcgcggcgcaatcgggctatggcgtagccttggtgccgcagtacctggtggccgaagaactggcccagggcagcctgatgattccatgggactatgcgatgcccagcagcggcgcacactttatcgcccatgccgaacatgccggcgagatccccaaggtgaaggccttcctgagctggatggtcgactatgtgagcgcacatcgcgattttcagtcatgacccggcgactttatttcgtttgcgacaagggtgggcgcccggcttagataaaaagacgcccgtcactgtcgagtctgcgattcatgagccacgaaaccatcagccagtcgatttccatcgttcaccccatcagcctcaaccacggtaaaaatgccgaggtctgggacaccacgggcaaacgctacatcgattttgtcggcggcatcggtgtgctcaacctcggtcattgccacccgggcgtggtcgaggcgattcgtgaccaagccacccagctgacccattacgcgttcaacgccgcgccgcacgcgccctacatcgaactgatggcgcggctgacggcatttatcccggtgacctacccggtcagcggcatgctcaccaacagcggcgcggaagcggcggaaaacgccctgaagatcgtgcgcggcgccactggccgcacggcagtgatcgcctttgacggcgccttccacggccgcaccctggccacactcaaccttaacggcaaggtagcgccttacaaacagaaggtcggtttgctgccgggaccggtgtatcacctgccctacccgagtgccgacaatggcgtgacttgcgccgaagcgttgaaggccatggagcgcctgttcagcgtggaaatcgacgtcaacgatgtggcctgtttcatcatcgaaccggtacagggcgaaggcgggtttctcgcactggatcgcgaatttgcccaggcgctgcgacgcttttgcgatgaacacgacatcctgctgattgccgatgaaatccagtcgggctttggccgtaccgggcagcgcttcgcgttctcgcgcctgggcatcgaaccggacttgatcctgctcggcaaaagcatcgccggtggagtgccgctgggcgccgtggtcgggcgcaaggcgctgatggacaacctgcccaaaggcggtttgggtgggacctattccggcaaccccatcgcgtgtgcggcggccttggccacgctggacgcgatgaccgacgaacacctggagacctggggcgcacagcagcaacacgccatcgtcagccgctatgaaagctggcgcgcgcaaggcctgccgtacctggggcgcttgaccggtgtcggcgccatgcgcggcatcgagctggcaaacgccgacggcacacccgcaccgcaacagctcgctcaactattaagcctggcgcgggacgccgggttgttgctgatgcccagcggtaagtcgcggcacatcatccgtttgcttgcgccgctgaccatcgagcctgcggtgctggaggaaggcctggatatcctcgaggcctgcctcaagcagttgggctagtaacgcgcatccacgggtctgccgccgctcggccagtccttgaccttgtcggggaagtccgggcgcggttgacccgagaaatacgccgccacgtccaccgcttcctggtctgacaaaccgccctgccccagcgggaatttctcgtgaaagccgatcggcatgttgcgtttgacgaacgctgccgccgtgtaggtgcgcgccatgccggcgccgatgttgaacgattgctcgccccacagcggcgggtagatcagctcgccatcagcgcgtgccaggccctggccgttgtcgccatggcacaccgcgcactgtttggcgtacacctgcttgccattggccaggtccggcttgagcgccgggtcgaccttgcctacgccgcgcccggcgactttgtcttcgggacgggtgttgtttttcatccagtcgaagtacgcaaccatcgcctgcatatccgccgattgcggcggcagtggcgtgccattcatcgagcggcggaaacagccgttgatgcgctcttccagggtcaccaccttgcccgcacgcggcgcatagctggggaaaaacgccgagacgcccacgaacggcgaaccatccgccaccgtgccggcattgaggtggcaactggtgcagttgagcgagtttccgacattggcgggcaacagcgctttggtttgcaggtgcaggcgcatgccacgaatgacttggtcggcattcggggcagcgagcagattggccagtcgcggggtttcaaacgccgatgagtccgtggtggccgggttgagttggtcacgcagttttttcacttgggcagcgctgatcggcgtgccttcgttgccccaacgggtgcgcacgaatgtcaggatttcggcgatttcctgatctttcaaacgggcgaaacccggcatggtgtagacccgtgggtgcgtcgccgtctgtgcggtctcccaaccggtgagggtgatgtgcagcagtgaagtcgggttgctggacgcgatgctcgggttgcccgccagggatgggaacaggcctttcacgcccgcgccatcgctgcggtggcagtcgctgcagaactgcatgtaacccaggccaccgcggctggtgaacaagtccgccgggggcgcggcgggcgccacggccacagccggcatgggcaggtcgtccttgccgggcggcagggacttcaggtaacgggcgatggccgtcaggtcgtcgtcactgaagtgctgggtgctgtggtgaatcacatcagccatgttgccggagaccgtggcaaagcggttctgcccggtcttgagcagttgcacggtgtcttccacggtccacaggttgcgcaggctcaaggcgcgccaatgctcgactgtttcaccggccaggtaatgctggccactgcgccccgcgtcgctcatggctttttcctggaaggcaatgccccgtggggtgtggcaggagccgcagtggcccaggccctggaccaggtaggcgccacggttgagctgttcatctcgcgccggatcggccaggaagggctgtttatcgagaaaggcgaaattccacagcgccaggccccagcgctggttgaacggaaagcccatgtccgcctcaagattggcctgctgcaccggctcgacgccttgcatcaggtagacgtacagggcgcgcatgtcggtttcgctcatcttggcgtaggacggatacggcatcgccgggtacaggttcatgcccgtcggcgttacgccttcgcgcatgacgcggtcgaactgttcgaaggtgtagccgccaatgcccgtctcgcggtccggcgtgatgttgctcgaaaagatcgtgcccatcggcgtgctcaactccaggccgccggccatgaccttgccttgcttggcggtgtggcaggcaatgcagtcacccaattgcgcgacgtatttgccgtgttcgatcagaggcgtgtcgggggtgttggcgtgcaggggaaaagacaagcagagcgtcgcccccagcaaggccaggcgggagagggaaagcgccatcgtattagtcctttgacaacctggcgtggggcggtcccctgggcgcaggtgtgtggtcgtttttatgggttcatcaggcctctgtgttgtaaaggatatgcgggcgaaggatgttgatatgggtcagggcgaaatcgatggcaacgacaggtacttgaccgttgataagttgccctttgaagccccgtgcacaattctgtaggtttcagccatcgaacgaggagaccaccatggagaccgtcacctacgccaacgcccgcgcccatctttccgaaacgatggatcgggtcaacgaagatcgcatcccactgctggtaacccggaaaaaaggcgagcctgtggtgatgatttcgttgtcagagttcaacgcgcttgaagagacaggctatctgctgcgctcgccagaaaatgccaaacgcctcatcagctcagccaacagcctgcgggcccgcaaagccaaagtagttgattgaataatgaaaatactcgcttcccctgagggcagaggcgactactgaatgaatttacccgcaggaacccaccttgacctgacctccctcccccctgaaaatgcccgacgcttttttgtcctcgtttactgaagtagtgaaatttcaatgtccgattcttacaccgaacactccgccaccgaagaatccgtcgtcgccttgcacgccaaagccgaatacgaaaacgccatcaatctttcacagcatctgcctgcggccaagatcatcagcgagatggtgctggacgctttccacacctccaaggaaagcgaccagatccgcgaactgcgcgtggccatccgtcaggcccacgatgccttcgacgacgacaaggcctacgacctgatgggtcagctcaagcagctcaaggatgccgaggccgccgacaacgctgccctggaaaacttgagcagccagttctccatcagccgcatactgtccagcttcaaggacgaccccgagttccaggagctggtctacggcctggcgcttaaagtgctgaaccagagccaccaggccatcagcaacccgagcgccggcaagagcaaggcatcccgcccgaagaaagaagccgaagtgtttgtgatcagcaaggatggcatcagcgtcaccctgccgctgcgcacgccgcgttcgaagcttaacgttgaccgtgaggcgttcgagttcctgggcttcagctttgtgggtgaaggcgatgaagcggagctggaagtcgagagctttgtggataacaccggcgccgagcagcctttgagccgcaagagtgtgattactgcgttgcagcagcagacggcgtttgatgggtacagcatcgcgcagcagtaacccttaatcccagccctttcaaggtctttaggtagaacaggcgaaaagtactctgtggcgagcgggcttgtcccgcgttgggctgcgcagcagccctgaaacccgcggccgaagaatgcctgtctcagcgcattcctccttcaagggtcgcttcgcaacccaacgcgggacaagcccgctcgccacagttgcagtgttcgtcctcagccagatagggtcggtttttcaaagaccttgaaagggatgagccttaatccgcaacactactgggtaccgctcccacgtttgatcggcgtcgcgtcaactgacctgctgcgcaaacacctcgcgaaaccgcgccatatcctgcttgtctcccaccgtcacccgtacccactgcggccagcttttaaacatccggccgatcagcacaccgtgtgccgccagcttctcgatcacctgctccgccggctgtttcacgtcgatcatgaagcagttggcctgtgacgccgtgcaggtgaaaccacgccccttcaaccaagccacagtttcatcacgcagttggctgttcagtgccttgcgttgcggcagcagtttcacgtcttgcaggctggcaaggccacccagcaacgtgctgcctgccggcacgttgtcaccgccaaacacggccagccgctccagcagcgccggatgaccgattgccaggcccaggcgcgcaccggccatgccgtagattttcgagaaggtgcgcagcaccagcaggtcgtcgtggtccttgacccaactgaccacgctgggaacatcggcaaagtcgatataggcctcgtccaccaccagcacgctgcctttgggtttgtttgccaaggcctggcggatggcatcagtgggcgtgacagtgcctgtagggttgttggggttgcacagatagagcatgccagcctggggatcggcggcgagcatggccgggatgtcgtgggcgtggtcggcgttgaggctgacttccttcaccgaggccctgttcgactcagcggcctggcgtggcacttcataggatggcgtggccatcaccagaccgcgggtttcactggtgaatgccagcactgcatagcgcagagcagccatggagccggcaaataccgccacctgttcttcgacaatgccctgttgctgggcaaacagcccggccagggcgtacatgtgtttgtaggggtaacgcccggacgttgcgattcccttgtgcatggcttcgcgggcagcccgtgagggcccgtaggggctttcgttatagttgagcagcaccttgtcaggcttggtcggcggcgggctggcaaccgcccaatcgaggcgtcccagcagaggcagggcggcgcccagggcgagaagggaccgacgacttacgctgaccatagggctactccttgtaggcgggtgatggattcgcacagcacgtactgaggggtatgacgataaacgcagccggggatttaaaccccgtccaagaaaaagccccgcgcttctctcgaaggcggggctttttcactgcgggaccactcagtgagcgtaggtcagcagcagctctttcggtacttggaaatccagggacatcatcacgctcagcgcggtgatggtgaagatcgagaacacgaacagcttgcgtgcccagacggtgtcatccaccgccttgtagccggtccaggccatgtacaaccagtacatgcccatggcggcagcgacggcgaggtagctcatgccggcgtagccactgaaggtcaacatcaaggtcgccacgaggaaggccaggatgtacagcaggatgtgtttcttggcgacctggataccacgctttaccggcaataccggaatcgacgcagccaggtagtcattgaagcggaaaatcgcgatggcgtaggaatgcggcatctgccacaggctgaacatcaccagtagcgtcagcgcggccatgtcgaagctattggttacagccacataaccaatcaccggcggcatcgcccccgacagactgcccaccagcgtgccgtgaaccgacttgcgcttgaggtacaggctgtagaggccgacgtagatgacaaaaccgatcacggcaaacagcgccgccagcgggttggccaccttgtacaacaacgccacaccggcaacacccaggacggtcgcgtagatcagtgccagtttcagggagatgaggccctggaccagcacgcgattcttggtgcgctccatcttgatatcgatgtcacggtcgatgcagttgttgaacacacatccggaagctaccaccagggacgtaccgatcattgcagccaggaagatggccagatcgacatgtcccttggaggccaggaagaaaccgcccgccacagaaagcacgttaccgaaaatgatccccggtttggtgatttggataaagtgcttaagcgacatcgggtcttacctcacttcgccatcatgaacgtatggatgctgaacatgatccatatcgacaggccaaccagcagtacgattacgatccctgcgaacacgaacgcaaccacgttgtcgcgctgctccttggaacggtccaggtgcaggaagtacaccaggtgcaccagaacctgaatcaccgcgaatgccagcacgatcatcaaggtgatcgacttcggcagggtcgggtacatcaccagaccgaacgggatgagcgtcaggattaccgacaggatgaagccgatggcgtacgacttgacgctgccgtggcttgcatcatggctgtcatggtcatgggagtgtgcattagccattacagagtccccatcaggtaaacaacggtgaagacgcagatccagaccacgtccaggaagtgccagaacaggctcaggcaggtcaggcgagtcttgttggtgttggtcaggccgtgcttattgacctgatacatcatcaccgccatccacagcaggccggcagacacgtgcagaccgtgggtgcctaccagcgtgaagaacgcggacaggaagccggaacggtgcgggccgtagccttcggagatcagcaggtggaactcgttgatctccatgccgatgaagcccaggccgaacaggaaggtcagggccaaccagctcagtacgcctttcttgttgcccttgtagaaggccaacatggcgaagccgtaggtgatcgaactgaacaacagcaaggcggtttcgccgagcacgtaaggcagttcgaagatgtcgtggcccgacgggccacccgctacgttgtttaccagtaccgcgtacaccgcgaagatcgacgcaaacaagatgcagtcggtcatcaggtagagccagaaaccgaaaacggtcatcggccccgagtcgtggtgatggtcatcgtgcccatggtcatcgacatgggcgtgtccagcattggtcactaagttcgacatggtttaagcctgttccaacgaggtttcaacacggttggccgggatcttcttctcggctaccaggcgagcgtgctgctcggcttcgatgcgctcgatcgtctcgaccggcaccatgtagccttgatcatcacgggcagcgtgaatgatgaagtaaccgatagtgcccaccaggctcacgattgccagccaccagatgtgccagatcatcgcgaaaccgaacacggtcaacagcgcgcccatcaccacgccagtggcggtgttgtttggcatgtggatcggttcatagtgcttcggacgctggtacgcagtaccgtcttccttggcttcggtgaacgcatcaatggtgttcgcggtagggatcacggcgaagttgtagaacggcggtggcgacgaagtcgaccattccagggtgtggccattccatgggtcgccggattcgcaagcgttctgcttacggtcacggatactcacgtacagctggatcagctggcaggcgatacccacagcgatcatcaccgcaccgaacatggcgacgtacaggtacggcacccactcagggttggtagtggcgttcagacgacgggtcatgcccatgaagcccagagcatagagcggcatgaacgcgacgaagaagcccgagatccagaaccagaatgcagccttgccccaaccttcgtgcagcttgaagccgaacgctttcgggaagtagaaactgaaaccagcgatgtaaccgaataccgcaccaccgatgatcacgttgtggaagtgagcgatcacgaacaggctgttgtgcaggacgaagtcagcacccgggatggccagcagtacgccggtcatgccgccgatggcgaaggtcaccatgaagcccagggtccacagaacctggctggtgatacgcagacggccatggtagatggtgaacagccagttgaatagcttcacccccgtcgggatggaaatcagcatcgtcgccagaccgaagaaggcgttgacgctggcacccgaacccatggtgaagaagtggtgcagccaaaccatgaagcccagtacagagatcgcgcccgatgcgtagaccatcgagtggtgaccgaacaggcgcttgccggtaaaggtcgagatcacttcagagaagataccgaacgctggcaggatcaggatgtacacctcagggtgaccccatgcccagaacaggttcacgtacatcattggattgccaccaagttcgttggtgaaaatgtggaaatccaggtaacggtcaagcgacagcagcgccatggtagcggccaggatcgggaacgaagccacgatcaggacgttggcccaggtgcaggtccaggtgaagatcggcatgtccatcagtttcatgccaggggcgcgcattttcaggacggtggccaggaagttgacccccgtcaatgtcgtcccgagccctgataactgtagcgcccagatgtagtagtccacacccacgccagggctgtactggatacccgacaatggcggatacgcaacccaaccggtcttggcgaattcgccgacgcccagggatacgttgatcagtacaacaccggaaaccagcagccagaagctcagggagttcaggaacgggtaggcaacgtcacgggcaccgatctgcagcggcaaggcaaggttcatcaggccggtgaagaatggcatcgccatgaagatgatcatgatcacaccgtgggcggtgaagatctggtcatagtgttcaggtggcaggtagccaggcgaaccctcggtggccatggccaactgggtacgcatcatgatggcgtcggcaaaaccacgcagcagcatgaccatggcaacgatgacgtacatgacaccgattttcttgtggtcgacggacgtcagccactcggtccacaggtaggtccacttcttgaaataagtgattgctgcaaacagtgccagaccacccagcgcgatcatggcgatggtcaccatcacgatcggctcgtggaacgggaccgcatcccaacttaatttaccaaacatcgtttactcctctgccccagcagttgaatgcgagcccgtgtcagaaccttcaaccacggccacttctttcttctcgtgcttgaccggcttgcctggcttcataccttcgtacttgtcgacgattttctgaaacaggttcggctcatacgtggagtacagggcgactgggttgttctggcttggtttggtcagggcatcgtattcagcttgatcaagctgtttaggtgcggccttgacttcggctacccaggcgttgaaatcttcctggctcgtcgagatcgctttgaatttcatgccggtgaagccagcgccgctgtagttcgcggagatgccttccatttcagctttttcgttggcgatcaggtgcaggcgggtctgcatgcctgccatcgcgtagatctggccacccagggctgggatgaagaacgagttcatcacggcgtcggaggtgatccggaaattgagcggggtgtgctcggggaacttgatctcgttgaccgtggcgatacccaggtccgggtagatgaacagccacttccagtccagcgcgaccacttcgatgttgatcggcttgacgtcggactccagcggacggtacgggtccagctcgtgggtcgacttataggtgatgtaacccagggcgatgatgatgaggatcgggaccagccacaccgcgatttcgatcttggtggagtgcgaccacttcggcgcgtaggtcgcgctggtgttcgacgcgcggtatttccaggcgaaggcgaaggtcatgatgatcacagggaccacgaccagcagcatcagcagggtggcggtgatgatcaggtttcgttgatccagaccgatctgtcctttcgggtccatcaaggtccacttgcagcctcccagcattaacatcatgccaagcagcggcaaaaagcctagtaatcgggggtacctgtttttactcatctcacgacctctaaagcagcttgcgcaatgcagttgggttttgatcgccaacacttcaccctgccaagggttggcatttctcttcgattgaataagagcctgcccatcacgtcataagggaacgtttcacggacctgcggtgagttcttattcgatttcgtggttaaaggccttgttacagaccaattccatttggtgcggatagttgaaaggctgccggaaccttggggtcgcacagagccatccatctgcccttcgaccgctccggtgctcaaatattgaacagcaccggacattcagtgcgggcgattgtagttagctagcgatgtataaaccatgtcttataaagaaataatttttatcgattacagcaataatccttcaccattattgcaacggttcgcgatcttatcgcgttcgattctcaacaaaaaccacaaaaaatgccgtgttatagggcagcctgccgcaccccttaccgcgtgtaaggggctgccaaaccgatgcaaccccccataaaacaaggcattcggacatcaccgaatccctggcgcggcgcgaggtgcgcggccttcccggcgccccgaactgacagcacatcttggcggttttatgcaaatttaagcgggggtttggcgggtcagaaacgtcctgcggcggcttccgtgtgacaacatgtcgcacaccgcgcgcagccaaaattgtccggcgtcacgttccgttcacaaatccccacacgcaaaaacgccccggccttcatgaataagcgccggggcgtttgagtgaatgattcaggctttgcgctggcgattgcgatagatgcccagcggcaccaggatcacggtcagcacgaaggccaccaatgcccattgcgccagggaaagccccagtacgggtgggtacggtgtgctgcagaagccatcgacctggaagcccagagggaacaccttggccagcggcaggtcatcgacgatcggttgcagcacatcgatgccgcagctgacctgggggaaaaactgggtgtacacgtgatgaccggcggcagcgacaccgccaagggcgctgagcaccaccaggccctcgaacagcgtgatcgcaccttttttacgcatggccgcgccgatgaacgcgaagatcgcgatcaacagcaaggcatagcgctgcaggatgcacaacgggcatggcgcctcgccgagtaccacctgcatgtacaacgcaccgccgatcagcgccaggcagatgatgcccagcaacaccagaaagcgccgctccctgcctaaacgcaattcgtcactcatccccgtatccctttgtttggttgtgccaatggccgcaagtttacacacaggccaccgtttaaacagaggggggttaacagcggattaatccagagaaatagaccgctgtatgtgggagggggcttgcccccgatagcagtggatcagccagcttatgtgcaaccgacctaccgctatcgggggcaagccccctcccacacctttgaccgccttattccagggcagcagccgggccaaagaattcgtagcggctttgctgctcgggtacacccagggccttgaggtggcgcttgatcgcggccatgaagcccttaggcccgaggaagtaggcgtccaggtcgcgctgctcgggcagccaggcggccagttgttcctggctgagcaagcccaccttgtccgccgccgggcttacgccatcgtcttcggtgtagcagtagaagcgcttgagctgcgggtgcttcgccgccagggcgtccacccagtcacggaacgcatggacgccgccgttacgtgcgcagtggatgaagtgcaccgggcgctcggtggccagcgcggcttcgagcatcggcagggtgggcgtgatcccgaccccgccgctgatcagcaccagcggtttgtcgctgaccgccagggtgaactcgcccgacggggtgaacaggtcgatggtcgcaccgacatgcagctggtcgtgcaggtagttggacacccggccaccggcttcgcgcttgacgctgatgcgatacataccgctatcggtcaacgccgacagggagtagttgcggcgcacttcctcaccgtcgagcaccagcttcatgccgatgtactggcccggcgcagcggcgaggatcggaccgttgtccacaggagcgaaatagaaggagatgatctcgtcgctctcgaccacgcgcttgaccacaataaacggccgcgccccacgccagccaccgggcgcctgggccttctcgtcgtagatcaccgcttcagcgccgatcaggatatccgccaattggccgtaggccgcaccccaggcactcatgacctcaggggtcgcaatctcactgcccagcacttcggaaatcgcccgcaacaggcaggcaccgacgatcgggtaatgctccggcaggatctgcagggccacgtgcttgttgatgatcttggctaccaggtcgcccaactggtcgagctgatcaatgtgtcgcgcatacatcaacacgccattggccagggcacggggctggtcaccgctggcctggtgggcctggttgaacagcgggcgaacttccgggtactcggacagcatcatgcggtagaaatgggtgatcagcgcttcaccgccgctttccagcaggggcacggtggatttgacgatggcacggtcttgggcactaagcatgggagcctcctgggcttctttactgattgcctttacctactcagtattcgtgccaactaataaaccgttaattttcaataacttaattaatgtgtagtcagtatgacttcctacaccttatagtcattaggactacaaggagtcattatgactgcgcaatcgctgctcaccaccctgctgcccctggtcgccgacctgtcccgcgaactgcccgaaggcgagcgttaccgccgcctgctgcaagccatgcgcgccctgctgccctgcgatgccgccgcgctgttgcgcctggacggcgagtggctggtgccgctggcggtggacgggttgagcgccgacaccctgggtcgacgcttcaaggtcagcgagcacccgcgctttgccgtgctgctcagcagccccggccccacgcgctttgacagcgacagcgaattacccgacccctacgacggcctggtcgagggtctgcacgggcacctggaagtacacgattgcatgggttgcccgctgttcgtcgacgaccagccctggggcctgctgaccctggacgccctcgacaccgagcgtttcgaacgcgtggaactggacgccctgcaggcgttcgccagtctcgccgccgccaccgtgaacgtcgccgaacgcatcgaacgcctgaccctgcgcgccgaaatctaccgcgaggccagcggccagcagcacaaggaaatgatcggccagagcaaaccccacaaacgcctggtggaagagatcaagctggtgggcggcagtgacctcaccgtgctgatcaccggtgaaaccggcgtgggcaaagaactggtggcccaggccatccacgccgcttcgccccgcgccgacaaaccgctgatcagcctcaactgcgccgccctgccggaaaccctggtggagagcgagttgttcggccacgtacgcggcgcctttaccggcgcgttgaacgaacgtcgcggcaagttcgaactggccaacggcggcacactgttcctggatgaagtgggcgaactgtcactgaccgtacaggccaagctgctgcgcgtattgcaaagcggccagctgcagcgcctgggctcggacaaggaacaccaggtggacgtgcgcctgatcgccgccaccaaccgcgacctcgccgacgaggtgcgcaacggccgctaccgcgccgacttctaccaccgcctcagtgtgtacccgctgcaggtcccggcgctgcgtgagcgcggacgcgatgtgttgctgctggccggtttcttcctggagcagaaccgctcgcgcatgggcctgggcagcctgcgcctgaccagcgatgcccaggcggcactgttggcctataactggccgggcaatgtgcgggagctggaacatttgatcggacgcagcgcgctgaaagcactgggtaactgtcgcgagcgtccgaagattctcagcctgaatgcacaggacctggacctgcccgatgtcagcgcagcgctggtcgaagaacccgccgaggcggtcgccctggtgaccggcgacctgcgccaggccaccgagcagtatcagcgccaggtcatcagcgcctgcctggagcgccaccagcacaactgggccagcgccgcccgcgaactgggtctggaccgcgccaacctcgggcggatggccaagcgcctgggcctcaaataacccaggcaactggttcacatgtgggagggggcttgcccccgatggaggtgtgtcagccagcccatctagcattgacccactgccatcgggggcaagccccctcccacactagacctgcttcgcctgaaaaaccgggctcgctggcttgggcttacgaaagaccaacacattgcccagcatcaccagcaccaaccccgccaacgccggcgcggtccactgatacccctcggcaaacgccgacacattcagcgccaccaccgggaacagcacggtgcaataggccgcacgctccggccccatgcgcccgaccagcgtcaggtacgcggtaaagccgatcaccgaacctggaatcaccaggtaccccagcgcgccgatataccgcgcgctccagtccatctcgaagggaatcccgcgcaccgcgcagtaagccgccagcatcgccgatccataggccatcccccaggcattggtggtcagcggcttgagcccggccttctgctgcaggctggacagcatattgccggccgagaagcacatcgtccccagcaacgccaagcccaggccaagcaaagtctgcgggctggcggtgtgccctaccagctccggccagaacagcaggcccaaccccgccaggcccaggccgccgcccatcaacacattgcgcgccacccgctggccaaaaaacatccgggcgttcagcgcgttccacagcgtggccgtggaaaacaccaccgccaccaacccgctggggatccattggctggccgtgaggaagcacatgaagttcacgcaaaacaggcacagcccctgggccagacagatcaggtgcccgcgccggttcatcacctgcaacctgcggctcaccagcaacagtgcaaacaacaccagtgctgccaggccgaagcgatagacgatggacacaggaatcgccaccacgcccaactgccatttgagggcgatccaggtggtgccccagatcagcacggtgagtaaatacaggaaaagattcatagcgggctccatcggttgagccacagtgtggcccccagcctgggatgcgctcttgcacaatcttgcgcttttgtcggccaatgggatcacagcaaccagcgcgcggagtaggatgcaaggcgtcagagagtacgaaccatgccagacctggaatccctgcaagtcttccaagcgcttaaccgctcgcccaacgcacgcctcgaagcctgcgccgagctcggtgacggcttgtctgcagcgctatggagcaaccatcacgacgcgcaggactaccaggcccccagccatcacacgttgtcctgctacatcggcggcggcaccggcacctttcgacgcgaccaacccggcaccaagggcggccccgacaaactgtgcatcctgcccgccgaacaccagtcggcctgggtgatcaacggcgaaatccgcctggcccatgtgtatttcagcccggagcaattcgcactcggttgcgtcaccctgctcgaccgcgaaccgcgcgccctgcaattgcgcgaaagcacctttctggaggacgccggccaggcgcgacgctttcatcagttgatagcgctgaactggcacgaacccgccgagcgcctgctgactagcagcctggcccatgaaatgctcagccacacgctgctcagccaagtgggcgcacgcgacgggctgcgccttaaaggcgggctggcggcgtaccagcggcggctgttggtggagtacatcgaccagcacctggaagacccgatcagcctaggccaactggccggcctgtgcgcactctcggaataccatttcgcgcggatgttccgccaaagcttcggcctgccgccccatcagtacctgctggcgcgccgcctgacccgcgcccaggcgctgctgcgcagcggcgcgctgcccttgagtgaagtcgcgttgatctgcggtttctccagcgccagccacttcacccatcgcttccgccaggccatgggcgccacgcccggcgaataccgccaagccttctacgcctaggtcatcaaccccagggtcttggccttggccactgcttgcgtacgccgttccacccccagcttgctgtggatgcgccgcgcatgggtcttgacggtgtgcagggagataaacaggcggtcggcgatttccaggttggagttgcccagggcgatcaattgcagcacttccagctcgcgctggctcaagggattctctgccgcgcccgacacggccgcctgaggttccatgcccaactcactgagcacccccggcgagcgcaatcgcagttcgcgaatcgcttgctgtacctggcaacgcgccgccagctccagcccggtttgcagcgagcgacgcgccaggaccgagtcgcccatttgccaagccacctcccccagcaccaggtgcagttcggtttccaggcagagcatgccgcgttgatgggttgcctccagcaaagccgtcagccgcgccaccggttgctcggcgcagcccagcttcacttccgccagcaccagcaggtattccaggcgcgggatcagttccagggtggccggcggcgcctgtttggcctggggaccacgaaagtggcgaagcacacgacgcaccgcttccaccgtcaattcggcgcgcccctgctgcaaccagaaatgcccactgaccaacagcaacactgcgcggtacaccgtgtcggggacctggcgctgttgcatcaagcgttcggcctcgcgcagttgcacaaaggcctcggcgtagtcgccacggttggcggccagcagggccaggccgagaaacccgtagagcacgcgcttgtcctggctgtgcaggcacatcttcaaaccggtctcgaagcactcggcggcaaggccgtcctggccttgacgcaacgccaggtgcccacggcgcagggcgatgcgccccaccagcggcccggctttcacacgttgcttgatcaacatcgcctgcacactctccagcaggctctgcgcccgatacggggcgccgcgctgctccagcaactgcgcgtgatccagttcaagcaacgcctcaagcagcaacgacccatgggcgcgggccaggcacaacgcttcgcggctcagcgcctgggctacgtccagttcgccgcgcagcagtgcttgctgagtgaggcccgacaggcacatcagccgcgacgtccaggcgctgtcgggcaaggcttgcagcgcttcgaggaaatgcgcgcgggagcgttcggcatcgccgcccaagtgcagcagccagccccactgtgcctgccagcgcgccagcaggtagcgttgttgcgccgccgtcggttgcggcgcgaaccgtgccaactggtcgatacattgcgcggcctggtcgaagcgcccggcgaacagcaacgccgccgtcaccagccccaccagttgcgccgagccgagcatcaactcttcaccatgctcttcatgcaaacgcagcagcaatacggcgttctgctggcggaacaggtcttcgaaactgaaatgctgcaacaggctgactgccacctcgtactcttcggccagcagcgcgtgctcgaacgcggcctgccagtcctgttcggcggtgaaccactggcaggcacgccgatgccaggaacgcttggccggccaggggtcatcgcgtatcagccgggcaagcggcgggaaaacctgcaaccactcggtatcttcccacggctggataaaggcgccgagcgcctgcaactcgcgcaggtagtgatcaccgtcgccaaagccgaacaagtgctcgcacaatcccgggttaaagcgtggcaggtgggccagcacgcgccaggcttccgtcagctcgggcggcaaggtgctgaagagttcgtgctgcaagtaatcgagcaaggttttctgcgggtggccatcccccagcaacgcaatgcgcacgccggcgcaccaaccggcgctgaattgccacacgctgtccgctgacggccccagcgggagcagttgctggatttcttcaagggtgaacgccaactcggcgcccccctccagcaattcatcgtcgagcaacaggcgcggccagttgcaggctggacggcgccgcgcgcccagccaccaggtcagcgaagggctgctcgccgtgagcaggcgatcgagcaaggcatcggtttcgggggtgggcaagcgacagaaatcatcgaggaacacccatgccgatgttggccagcggccaagatctgccagcagcgtggcttcatcgctgaacgccaagccgaggttttgcgccaggcgccggcaaaggtcgagggggctcagggcgacaccattgagcggcaaccagtacacctggcatcccgctggcgcctgcaacgcacattcggccagcaacgcactcttgccgctgccgccgggggcgcacagcaacttgaccctgaccggcgctgccagcaacggcccggccaggcgtgggcgcaacagatggtgggcggacagccgaggcatgaatccaggacggtccagacagcgtgtcatggcggtcattgctgcatcctgcgttcttattgttatgcaacgtggcgtctaccctagtcctgtggttggtggttgttgaagaagtattcagcggggtgattggcgggcataaaaaagccgggagcccgaagggtcccggccaggtcagagggtgatcagcgcacgccttcggccctcagcgcagccggggtgtaatccgccgccttggccgcaaagccaaacacgaagctgctcttctcctcgttcttcatgcccagcgcgatgtagcgcccggcgatgatgtcgtacagggtttccacggtgtaggccggggtctggtggtcgtagtagaactgcgcatggccttcggcgacccgccacagttggccacggccgtcatagtgatccaccagcgccacctgccagctgtcttcgtcgatgtacatgtggcgcttggcgtagatgtgccgctcactcggcttgaccgtgcccaccacttcccacacgcggtgcaactcatagcgggtcaggtcctggttgatgtgaccggccttgatgatgtcgtcgtacttgagcgttggctggtccagcctgtagctgttgtaagggatgtacatctccttcttgcccaccagcttccagtcgtagcggtccggcgcgccggagaacatgtcgaagttgtccgaagtacgcaggccatcggaggcggtgcccggtccgtcgtacgccacttgcggcgcccggcgcacacgacgctgcccggcgttgtagatccacgccaggcgcggttccttcacctggtcgagggtttcatgcaccagcagcacgttgcccgccaggcgcgctggtgccgtcaccgactgtttgaagaaggtcagtacgttggccgctttggccgggtccatgtcggggatcagttgcggcaccgctacttcttcctcaaagcggatcggcgtgtagctcccattggtctgcggggtggcctgggtgatgatgcggcgcaggttgccgccgtggtaacgggtgatgtggttccacagcacctccacgccattcttgggaatcgggaacgcgtagtagcggttgccggtgaacccttcgaggccgttgccatcgttgatcggcttgacgttcaacgcgctgcgcttgatcgattcatagatctccggcggcaggttgacggtgcggtgggtcgggtacaccgggatcttataggtctcggggtagcgcttgaacatggccacctggccgtcggaaagtttgtccttgtacttgtcgacggtggccgcggtgatcacgaacagcggtttttcactggcgaacgggtcagccaggaagcccttgctgtccacggctccggcgtttttcgggatgcctccagtccaggcagggatcgagccatcggcgttgccggctttctcggcgcccaccggggtcaacgtagtgccgagcttggccgcctcttccggggagaccgcggccatcacgttgacggccaacaggctgagggccattaccgcaattatcttacgcatagagtgttgtccttccttaagccagatcagaagttcgcgccgaagctgagggcgatgaagtcgcggtcggtgagggtgttgtagtcgccgccgaaaaagtcggtgtagctgaggctggcggtataagtgctgcggtaatccgcatccacgccgacgctgatggccttggcgcccttgttgaacaggccgttggggccgtagccggccacgtcatgggaccaggacaggttgggcttgaggttcaccccggcaatcgcgttgttgtagtcgaggatcgcccgcgcgcggtacccccaggagttggccgtgacaaaaccgtcggtgtcaccctggaaaccgtaggcgccatacaccgagtcgcggccataacgcagcttggatttgtcctccaacccgccaacgtgcacgtaggccgcttcgccgaccagggtcaggcgttcagcgcccagtacctggtcgaagaattgggtcatggtgctttggatctgggtgatttccttgcggcggtaacctttgttgtcgtcaccgaagttgctgcggatcggcgaggccagttgcccggcgaccgggttgatcagggccagggtcaggtcggtggtgttgagttgcaccggggcattggggcgatagctgatctcgccggtccacgccgtgccggtgggcaatgtggtggagaaactcgcaccaaacaggcggatatcttccgggtagtccaggtagtactggccacggccaagcatcaggctctggaccagacctgcgccggagccgggcgcgatgccattggctgcaccggcgatcgcaccgagccgggccaggctcgtattgttggtgatggtgcccacggtcggggtgcggctgtggtagttcatgaaatacaagccgtattcggtgtcatcccccaaccaacgcaacgccgtaccgaattgaccactgtcacgcgcgtcgcgatcctgcgcacgctgcacgatcaccccttcacgagtcacttgaaagccttgcccaaacgcggcggcgacaggctgcaacggcgcaatcgccgggttgcccaccgtgtagttgccattacagccatgggccgccacatccccaccaaagaatgtgccgcagttatccagcacggtgttttcccagttcagctggtagaagccttccacggtgagttggttggtcaggctctgggaggcgaacagcatgttcaccgggatcagcccttccttgatctctgcgcccgggcggcggaaggccgaaacgtcgatggggttgatgctgttgatcgagttaccgataaaggtgctctcgccccagctgaccacttgcttaccgaggcgcacgttgcccggttggtcgccaatcgaatagttgtgatacacgaaggcatcgagcaattcatagccggatgaacgcgcgccctcgtcacgatggtgattgctgatctgcttgaactcgcggtcttcgtcctgcaactcgaagtcgtaccagtacttgccacgcacgaagacgccgctgtcaccgtacttgagttcaaggtcgtggatgcccttgaagatcttggagaaggtctcgcccttcttgaagttcaggcgcccgtcatccccggtagacgcctggccagtaccgccgttgacggtgcctaccagttttttgtctgcgtcgcgcatgccccaactcgcgcccaccgacagcgaggaatcgaattgcccttcgatctcgccaatgttgaacgaaacagcctgtgcctgggcacagcaccccaacgcaaccgcagcggccagcgcctgtggcctgaagatggcgcgcattgttgttcttgtcatgcgtcttccccggtgagtgacagaaggccccaccctactgccgcgtctcaggagcgataagcgcaccaaggagggattcgtgttgtcgctcgaaaggatgacaaggcgctctggccggggtctggccgggggcatgcagcgggtggatagggggttatcaggggaatggatagcacgtacggacactattgccgttttagtaacagtccttgtcacgaaccggcattactcatcctgttacaaacgactattcttagcgggctttcagggcaaacggcccgcttcccccgaccggaagaaaagccagattcaaatagattgaggcctgttttcaatctgttaccggtgttcactgacgttgatttgtcgctccttgatccaacgtctgacttcagccgctgcgtttgcagcggcttttttttgccctgaataaaacggggcgccatcagcgccccgcaggattaaagctttttcaagcaacgatcacaggctgtacttctgcaagttggccatcatttccttcaacgcttcgatgttgtccttggggtgtgccgcgccttcgaagtcgcagatctgctgccagtgcgccgccacgtcttcgggcgagaaccccgcctcagggtcaaagcccacacccaggctgcgttcccagcgggtcttgccgatccaaccgccgcccacttcaaacagcccggaggtttcctggcaggcttcactgcccaggtacaccaccagcgggctgaccagttccggtttgaggcgttcgaacacctgcggcgggatcaagccttcggtcatgcgtgtaccgccggtgggggcgatggcgttgaccaggatgttgttcttgcgtccttccagcgccagcgttcgggtcaggccgtacaggccgagcttggccatgccgtagttggactggccgaagttgccgtagatacccgaggtagacgcggtgaagatcacccggccatacccttgctcgcgcagatggggccaggcggcgcgggtgactttgtaggcgccttcgacatgaacccggtaaaccaggtcccagtcgctgtcgtccattttgtggaaggtcttgtcgcgcaggatcccggcgttgttgaccaccacatcgatacggccgaaggcgtcgagggcgttctgcacgatcttgtcaccgtcggtgacagagtcgtggttggcctcggcgataccgcccgcttcgcgaatctcggccaccacccggtcggcggcggacgcattggcgccttcaccttgcgtggaaccgccgagatcgttgaccagaaccttggcgccatgcctggcgaacagcagcgcatgggcccggcccaatccgccaccggcaccggtgacgatcacgaccttatcctggaactgcactgattcactcataccgaactccaatggcgacaatgggaatgggtcgagtgtcaggcaccggggcgctggtcacaataaagccggccagggctgaatggtgctcgataaggctgagggataatcgtccgatcaggaataggccattcgcggagccgagtggccgatgcgatcacgaaacgccaggtaatgcttgagcacctgcaccggcgcctcgatctgcgggtagtgaccgatattggccaatagcaccgtgtcggcgtgaggcaccagttcgtgataacgcgccaccatgtgagcaccggagatcgggtcgatctcgccgtcgatcacccgcagcggcacatcagtgtgttgcatcgccgccacccaacgctcacgcaggcgtcgacgctgggggatgtaagcgatgagtttgtgcaggatgcgcgtgccatcgttgcggtcgatcaggctccagaagtcgtccagggcgctttcgctggggcgggtgttgggtccgaatatctggctgaaactgttggccagggcattgcgcccgaacgcacgaccgatcatccagcccagggggctgagcagcagcttttgcaccagcgccggacgatgggtttccgggaacaacccgccgttgagaaacacgcagctggccatgtgaaagcggccttcgcagtgccgggccagcagttcctgggccacgctgtcgccatagtcgtgggcgagcacatgcaccggctgatccacacgcaggtgctccagcagcgcctgttgcaagtccgcctgttccaacaggcaataaccatggtcgaggggtttggccgagtcgccaaaaccgagcatgtcgcaggcgatcaccaggttgcgttgggcaaggggctgccacaggtaatgccagtcccaactggcagtgggaaagccatggatcaacaataagggttcgccctgccccgccacccagtagcggatagtgcgtccgttaaagtcgaaggtctggctgcgtttgcgccagacactcagcgggatctcggcgagaggcatcaggttttatacccaggatcgaggctgtccaatttacgcagcaacgccggccacgcaagcgcgccccccataccttgcgcactctttgtgacagccgccaccatcgccttggcaccggcgaggatctgcggcccgatggggatcaaatccgccccgccgctctgggccagcacctggatatcgcaggcgcgctggaaggtaaacatcatcagaaacgtgtcggcgatggtgctaccgcaggtcagcagaccgtggttgtgcagcatcaggaaattattttggccaagatcggcctgcaaacgggccttctcttcgtggttcagcgccacgccttcgtaggcgtgataagccaggctcgacagcacgaagatcgattgctggctgatcggcaagacgccctgcttctgcgccgccaccgcgacaccggcagcggtgtgggtatgcagcacgcacgtcacatcgtggcgcacttcatggatggcgctgtggatggtgtagcccgccgggttgatctcgtaggggctgtccatcagcttgttgccggcctggtcgaccttgaccaggctcgacgcggtgatctcgtgaaacatcagcccgtaggggttgatcaggaaatcgtcggtgcccggcaccttggccgagatatgggtgaagatcaggtcatcccagccgtgcatcgccaccaggcggtagcaggcggccaggtcgacgcgggtctgccattcggcggcgccgacctgatctttgacattctgtggcgatggaacgggggctagactcacggcaacgacctccttggcgcactttcttattgttttttgagtgatgggccagtctagtcagacgccctgcccgccgtagttgccttggcagccagcttgatgaccgtgcgggtcagccttgagaatagtttaaatccgtgcaagcgacgtcagagaagtgccgccaataaaggcgcggcgaacaggttgagcaagccggtcaggaccatcaccaggccagcaaccgagccctcttcgccgcccacttcatgggcccggctcacgcccgcaccgtgggcacccacgccaaacagcgcaccgcgcgccagcggcgtacgcaggggtagccatttgagcagcacaccgccgagcatcgccccaaacacaccggtgaacatcacgaacaccgccgtcagttcaggcacgccacccaggtcggaggacaccggcatggcgaacggcgtggtgatggagcgcggcaccagggacagggtcacagagctgtccagggccaacgctttggccaagccaaatgaggtggcgatggacgccacgctgcccgccaccatccccagcaacaacgccgaccagtaacgcgccagcaaccgccgctgctgccagatcggcacggcgaatgccacggtgacggggccgagtaccagcatcagccagtgagtatcggcggagtattcggcgtaggccgtgttcatcggcacggccaccgccagcaacagcacgggcaccaggatcagcggcgacaacagataacgcccggtacggcggtagatccagcggctgaagacatatgcgcccacggtcaaggcgagccagaacaccggcatcagctcaagcttcatggcgcagcctccagcggcacaccagctccacggtgaacgcggtcaccagcatcaccgccagggtgctgaggccgatgaccagcaggatgcgccaaccgtcattgcgcagcaggccgccgtagtccagcagactcatcagcgcagggatgaagaacagcagcatttcagccatcagcacgccggcccccagttgcagggccgccggtttgaccaggccgctggcgaagaccatcaacaacaggcccaggcctaccacaccgccgggaatctgccacgcccaccacacggccagttggcagccgaacaggtaaatggccagtagcacgaccagttcaatcaacagacgggtgaaacgtttcatgggctttgggtcctcgcaggccttcattttaaagaggcatgtcccatccccacagcgaattgttagactgccagctattccaaatcggaatttcgcacatggaattcaaacagctacgcagcttcgtcgaggtaatccaccgcggtggctttacccaggccggcaaaaccctgcatatcagccagtccgccgtcagcaaacaggttgcgcaattggagcagagcctgggcacgcccctgctcgaccggatcggctcgcagattcgcctgaccgccgccggccaagtcgtcctgcaacgcgccgaagccatgctgcgcctgcaaaacgagctactcagcgagttggacgatatgcaccagttgacccgaggcgagttgcgccttggcctgccattgttggccggtgatacgttgttcgccgaactgtttgccgaataccgcaggcgttacccgaacgtgaccatccagttgctggagggcggcagtcgcaatatcgaacaggccatcctgagcggcgaactggaagtagggggcagcctgaaacccagcgacccggcgtttgcctggcaagcgttctgcgatgagcccctggacgcgctgttgccgattgatcatccgttggcggaaaacgcccaggtacgcctggaggaattggccgacacgccgttcctgatgtaccagcgcagtttcgtgctgaacgaccgcctgatgcaggcgtgtgagcagttgggttttacgccgaaggaaatcggtcgcagtggccaggcggacttcctcgccgcgctggtcgccgccggccagggcgtggtgctgctgcccagcgtggtcgcccgtgggctggtgcgaccgggggtggtgcgcctgacgctcaaggcgcccgactacttgcgctgggacattgcatttatctggcgtgacggcgcctatctgtcgaaagccgcccaggcctggctggcattgctgcgtgagtttccggtcaagcgcgcagtgcagtgaccagctccgccagccacggttcggcgtcggcttccggggtcacactttcgctggcgtccaggcgcaacatcggcagtacttcgcgcacgcccagctcgccaaacagctcgcgcatctgctcgccaccaccgcagaaggtgtcgccgtagctggcgtcacccaggccgatcaccgcaccgggcaggccgcgccaagcggcgggcagttgatcacgaatcgttgagtacaggggttggagattgtcgggcaattcgcccatgccggtggtggacgtcaccgccagaaacgcgtccggcgcaaacgcctgcacatcggcgaggctggcgcgagggttgtgccaggcctcgaaaccggcggcattgagaatgccgacagcgtgacgggcgacttcttcagccgtgccgtagaccgagccggaaaggatggcgactttcatcaatctgatcctgtagttgagcgaaagcctgggatattaacagctgccacaattttttcggcgcaccccgtgcaacattcagggcttgccataaactccacagttcaaaaacaagccatggaccgctcaatgattaacgccaagctgatgcaactggtcatcaacgcctccaacgacggtatcgtcgtcgccgagcgcgaaggcaaagacaagccgctgatctacgtcaacccagctttcgaacgcctgaccggctacaccctggatgaaattctctaccaggattgccgcttcctgcagtcgggcgaccgtgatcagccagcactgatggcgattcgagaggcactggaaagcggaggtgcatgccgggaaatcttgcgcaattaccgcaaggacggcagccatttctggaatgagctgtcgctgtcgacggtgtacaacgaggccgacaagcagacttatttcgtcggcgtacaaaaagacgtcacgttgcaggtcaaggcccagcagcgcgtcacccaattggaaagcgaactggcccaggtcaaggccgaactggccgcgctcaaagcgacgagcggatctaacaaaatttaggaagtgcgatcattaggggggataatggcattttaacacccctaatgagcacgagtgatgcaacgcgatgcgctcctgacccaggacgagctggatttcattcagaacatgcagcacaacccgcaactcaacctgcgggatgcttcatcgagcctgaccgttaacggcggcgcacagattcgcgacttgcttacccggctggccgctcacgaccacctcaccatccaggcacaattcgataatcagcaactgaccttccccttgcacctggtggaagacgagttcaatgccgtgcacctgcgtttgggcgtgccaagcattttcgaagacgggccgatgattcgtccctggcgcctggccctggaaaccccggtggcgctggagaacatcaggggcaacctcagtacgttgtgggtgcatgaagtgtcgttcaagggggtgctggtggagattcgcgggcgggtcaaaccaccgaaaaccttttccctatggttcagcccatccggctacgagcgcatcgccttgcgcggcacattggagcgggaaaccgcccgaggcttgttcgcctatcgcctgagccagagtgatgcggatgaaaccgagcgtctgcgccagttcatcctgcatcagcaccgcctggtgcacccgcacgtgcacgcctgatttcaggtatccaggttgccgctgaggaactgctgcaggcggcgctgcatcaagcgcccgtcactgcccaggcaaccgacgggcgagcccacaaggtctttttccgccaggtccgaagcggcgccggcgatcagcaatgggcaatccagggtctgcgccaagcgattcaagcgtcccacccgctcatgattgtgtgcatgattggaaaacacgatcagtgcctggggatgggtcttctcacagatcagcgtcaattcgtccagcggctggccgaccgccaggaccttcaccgccaagttctctcggctcatcagtagcgcagccaccaacaattccagtttgcggcactcgccggggatggccgcaagcagcacccgcggcaacggctccgcacaggccagttgcaggcgctgcaaggcccggactcgcaggaagttatcgaaaaacaaccattcgctggcctgaccgaaccggccctggtgacgcaacagctcgtgccaaagcggcatcaggatgtcttcaaaagccacgctgagggggtaggtggcaagaacactggcgtactggtgttccaaccgtcggtcgtcgaacgcgctgacagcctgcatcatctgtgcctgccattgagcccagtccccgccctccagcgagtcttgctcggcgcgaacagccagggcttgctggtcgtcacgggcgagaattttcccaaccttgctgaccgccacaccgcgctcgatccaatcgaggatacgattgacggtcgtaatatcagccttggaatacaaccgatgcccgctttcggtgcgtacgggctggatcaggccgtaacgtcgctcccaggcacgcaaggtgaccggattgacgcctgtcattctcgagacttcacgaattggaaacagcttatcggaatcggtcgattcaagatgcaaattgctatcatgggaggcagtgatcacgggcattggagaccaaaaaaccaacggtaaatagaacctcatttaacgcccttagacctgtctttttcaaggtcccagcttattcggaccaatgcctctggcgtatttgtgcaaaacaggaataatccttgcctgtttttacagagcggcaccaccccgccgctttgtttgtgcgccccctacccggcccggcgcacctgaatatttggagatacacaatgtctacctcccccgtcaccctgatggttgcgcgtcgcgtggccaagggtcgctacgaagaattgatggcctggctgcgtgaaggcgagcaattggccacggattttccgggttacctgggctcaggcgtgcttgccccgccgcccaacgatgatgaattccagattattttccgcttcgccgatgaaaaaaccctgcatgcctgggagttttccgcgtcccgcagtgcgtggctgagccgtggcagtgagctgtttgccgacccgtccgaacaccgcgtgcgcggcatcgacggctggttcggcgcagtgggcgcgcgcccacctcgctggaagcaggccgtagccatctggctggcgtttttcccggtgtcactgttgttcaattttgtgctggggccgctgctgagcgaactggacctggcaccgcgcgtgctggtcagtaccctggcgctgacgccactgatggtttactggttcatcccgctgtcgacccacctgttggcaaactggctgcatcctgcccctgcaccgcgcaaggctagcgaagccgcggcgtgaatacaggggcgctcggtcgctggtatagtttcaacctgccagcgactcgagcctcccatgactgcaacaaacgccccgatcctgatcaccggcgccggccagcgtgtcggcctgcattgcgcccagcgcttgctggatgacggccacccggtgattttcagctaccgcagcgaacgacctggcgtgcaggtgttgcgcgagcgtggggcgatcgcagtgtttgccgacttctccagccaggccggtatcctcgcatttatcgctgagctgaacacccatacccagagcctgcgtgcgatcatccacaacgcctcggcctggatggcggagtcgcccgacgacgaaagccgcgcgtttaccgacatgttcagcgtgcacatgcttgcgccgtacctgatcaacctgcattgttcacccttgctgcaccgctcgacaccggccgacatcgtgcacatcagcgatgacgtggtgcgcaagggcagccgccagcacatcgcctattgcgccaccaaggccgggctcgacagccttacgctgtcgtttgccgcgcagttcgcgccgttgatcaaggtcaacggcatcgccccggcaatggtgatgttcaacgacggcgacgacgcgccctaccgcgccaaggtactggccaagtcggcactgggcatcgagcccgggcccgaggtgatctaccagagcgtgcgttacctgctggacaacccctatgtcaccggtaccaccctgaccgtcaacggcgggcggcatatcaagtaagccgtttgtgaggatgttgtatgaccttatccctgccccaccattaccgcgagatcctcaagggcttgggcgaagaccccgagcgcgaaggcctgctcgataccccaaagcgtgccgccaaggccatgcagtacctgtgtcatggctacgagcagaacctggacgaaatcgtcaacggcgcgctgtttgcctctgacaatgacgagatggtgatcctcaaggacatcgagttgtactcgctgtgcgagcatcacctgctgccctttatcggcaaggcccatgtggcctatatcccaaccggcaaggtgctcggcctgtcaaagctggcacgcatcgtcgacatgttcgcccgccgcctgcagatccaggaaaacctcacgcggcaaatcgccgatgccatccagcaagtgacccaggccgccggtgtggccgtggtgatcgaagccaagcacatgtgcatgatgatgcgcggtgtggaaaaacagaattcaaccatgaacacctcggtgatgctcggcgcgtttcgcgagtcgaacaccacgcgcatggagttcctgcaactgatcggacggagcaagtagcaatgccacaacttcaaccaggcatggcgcgcatccgggtcaaggacctgtgcctgcgcacctttatcggtatcaatgaggaggaaatcctcaacaagcaggatgtgctgatcaacctgaccatcctgtacgccgcccaggaagctgtgcgcgacaacgatatcgaccacgcgctgaactaccgcaccatcaccaaggcgatcatcgcgcatgtggagggcaaccggtttgccctgctggagcgcctgacccaggaactgctggacctggtgatgagcaatgagtcggtgctgtacgccgaagtggaagtggacaagccccatgcgttgcgctttgcggagtcggtttcgattaccctggcggccagccgttaacccctgagatttgcgtgaaccttatgaacgaccaacaacgactcgaactcgaagccgccgcctttcgccggctggtggcgcatctggacagccgcaaggatgtgcagaacatcgacctgatgaacctcgccggtttctgccgcaactgcttgtccaagtggtacaaggccgaggccgacgcgcgccagatcgagctgagcctcgatgacgcccgtgaagtggtgtacggcatgccgtacgccgaatggaaaacccaataccagaaagaagccagcgccgatcaacaggcggcgttcgccaaaggaaaaccccatgactgatttgaacaccctgcgcgccagcctcaacagcggcgaacatgtttttgccgataccctggcgtttgtcgctgccggttatgagtaccagccacaggcgttcaccaatggcgaggtagagaatgccgcagggcagaacgaagggtcgtgcaagacgttgggtttggcgctgctggaaggcttgagcgatcaggaagcgctgctggcgtttggtgaacattaccgctcagtggtggcgacgcctgagggcagcgaccacggcaatatccgcgcattgatcgcaaacggcctggccggtgtgaagttcaccgcccagcccctgactcgcaaatcctgagccagacctgaatcaaaatgtgggagggggcttgcccccgattgcagcgtgtcagctaatgaatacctggctgatacaccgctatcgggggcaagccccctcccacatttgtttgcggcgttggttagaacgcagcgtctttcagaccatccaggtaacgctcggcatccaatgccgccatgcaaccggcgccggccgaggtgatggcctggcggtagacgtggtcggccacgtcaccggcagcaaagataccttcgatgttggtcgcggtggcgttgccttcacggccgccctgcaccaccaggtaaccgtctttggcttccagcacgccctcgaacagcgaggtgttcggggtgtggccgatggcgatgaacacgccgtcgactttcagctcgtcgaagctgccgtcgttgttcttcaggcgggcacccgtcacgcccatgttgtcgcccaggacttcgtccagggtggcattgagcttgaggatgatcttgccttcggcgacacgggcatgcagcttgtcgatcaggatcttctcggcgcggaaggtctcgcggcggtgaaccagggtcacggtgctggcgatgttggccaggtacagcgcctcttccacggcggtgttgccaccgccgaccacggcgaccggtttgttgcggtagaagaaaccgtcgcaggtcgcgcaggcggaaacgcctttgcccatgaacgcttcttccgacggcaggcccaggtagcgagcgctggcgccagtggcgatgatcagtgcgtcacaggtgtacacgccgctgtcgccggtcaggctgtaaggcttcttggagaagtcgacctggttgatgtgatcaaacacgatctcggtttcaaagcgttcggcgtgttctttcatgcgctccatcagcaccgggccggtcaggccgtggacgtcgcccggccagttgtcgacttcggtggtggtggtcaattgaccgcccgcctgcatgccggtgatcagcagcggcttgaggttggcccgggcagcgtagacagcggcgctgtaaccggcagggccggaaccgagaataatcactcgcgaatgacgggtatcagacatgactcactcctatcgaccgcccggactacaaggcggctggaataaaaaagggaccacgaagcacttggggaaggcttgaactcgcaggccctgaaaaataatgggtgcagcgtatcgaggggggcaagattaaggaaatacggaataacaatccagctcatagacggtcactatgtagttggcccgactgatcgacgggtttgttacggctgatgtcgcggctttcgcctgcgatgtaaagccggtaaggtcggcgcgttcgcccttttgctcggagttctccatgcctgcccctgctctttccggcccgcaatacctgcgcgaaggcctcaaactcgtattgagccccggcctgcgtctgtttgtgctgctgccgctggcgatcaacctggtgctgttcgttggcttgatctatttcgccggtcatcagttcagcctgtgggtcgatcacctgatgccgacgctgccgagttggctgagcttcctgaactatctgctctggccattgttcgtggtgctcgtggtgttgatggtgtttttcaccttcaccatgctcgccaacatcatcgccgcccccttcaacggctttctctctgagaaggtggaagtggtggtgcgcggcaccgatgacttcccggccttcagttggggcgagctgatcgcgatggtaccgcgcaccctcgcccgggagatgcgcaagctgggctacttcctgccacgggccatcggcctgtttatcctgtcgtttattccggtggtcaatttggtcgctgcaccgctgtggttgctgtttggcgtgtggatgatggcgatccaatacatcgactacccggccgataaccacaagctgggctggaacgagatgctcgcctggctgcgccagaagcgctggcagagcatgagtttcggcggcatcgtctacctggtgttgctggtgccggtggtcaacctgctgatgatgccagcggcggtggctggagcgacgttgttctgggtgcgcgagcaaggcgccgaggcgatggcagcgcagcaaaaggtgactcagtcataaatccatcatctcgatgacacaatgacgacatggcccacggtgacactgtgggtcatgacgacagcttcgcttcacatcacccttatcaccgaaaccttcccgccagagatcaacggggtggccaatacccttggccgcctgtgcgaggggttgcgggcgcgtggccatcaagtcgagctggtacgcccgcgccagggcgtcgaccagagccgccccagcgacgacgcgttactgctatgccgtggctggccgctgccgggatatccgggcctgcagtggggccagtcgtcgatgcacaagctgctgcggcgctggacgcgtcagcgtccggacgtgctgtacatcgctactgaaggccccttgggcttgtctgccctgcgtgcggcccggcgcctggggatcagcgtggtcagtggctttcacaccaacttccagcagtactcgaaccaatacggcttgagcatgctgagccggatggtcacgcactacctacgctggtttcataaccgctcaaccctgaccctggtgcccagcgccagccagcgcctggagctcgagcgccggcatttcgaacgcttgggaatgttgtcacgtggggtggacagccaactgttccatcccgcaaaacgtgacaatgcgctgcgggaaagctgggcattgaacagcgaacagactgccgtgctctacgtgggcaggctggcgcaggagaaaaacctgggcctgctaaagcgctgcttcgaaacgttgcaagacacctacccaatgcgccagatgaaactgatcatcgtcggcgatggcccacaacgcgcggcgctggaaaaggagctgccggaagcaatcttctgcggcaccttgcgcggtgaagaactggcgcggcattacgcatcgggcgatgtgttcctgttccccagcctcaccgaaaccttcggcaacgtggtgttggaagcgatggcatccgggttgggggtggtggcctacgaccaggccgctgcaacccagcatatccgccacggctacaacggcgtgctggcgatgcccggggatgagaacgcattttgcgaggcagccaactggttgctggaagacgccgaaagcttgcgccgcatgcgcctgaatgcccgccaacacgccagccgccagggctggccggcgattatcgagcagttcgagcgtcagctgcgtggggtttgcaaggacgggcatccggtgcccgccctgtcgccgcttacaccagggtcgtcaacgcctcacgactgaaaggcaggatgtcgccctcgcgaccctcgcgcaccttcaacgcccaatccgggtccaccagcagggcacggcccacggcgaccagatcaaactcgtcgttgttcaagcgctccagcagcttctccaggctggccggttgcgcgactttgtcggtgttgaccatgaactgcaggaactcgccatccaggcccacgctgcccacggtgatggtcggcttgccggtgagctgacgggtccagccggccaggttgaggtcggaaccttcgaattccggctcccagaaacgccgagtggagcagtggaaaatgtccacacccgcatcagacaacggcttgagaaactcgcccagcgcttgcgaggtttgcaccaggcgcgcggtgtaatcctgctgtttccactgggaaaagcggaagatgatcgggaaatcagggccgaccgcagcgcgggtagcctggatcagttcaatggcaaagcgtgagcggttggccaggctgccgccgtattcgtcggtacgctggttgctgccttcccagaagaactgatcgaccagatagccgtgggcgccgtggatctccacgccgtccatgccgatgcgctgcgcatccttggcggcttgggcgaaggcgttgatcacatccttgatgtcttgctgggtcatgccatgcacgacgacgttgccatccttgagtttttccatcgggccgtaggccggcacgctggcgtcaggttcagtgccgatacggcgcacactacctacgtgccacagctgagggacgatcttgccgccttcggcgtgtaccgcgtcgaccactttcttccagccggccagggcggcttcaccgtagaagtgcgggacattggggtaaccgttggaggcctggtggccgaccactgtgccttcagtgatgatcaagcccacaccggcggcggcgcggcgacggtagtactcgatcactttggagttgggcacgccacccggcgagaacgagcgggtcatcggcgccatgacgacgcgggtcgacagttgcaatgcaccgagctggaagggtttgaacaaggcttggacgggcatgggggcactccacggaagacggggtttatgatgtggataatatggggagtgcagcatgctgggtagcactattgatctgggtgattaaggggtaaaagtgatggccggttggggctgctacgcagcccagcgcgggacgagcccgctcactacaactgcggcgctcagctgagggctttttcgatggcctggacgatcgtcgggtcatccggtgcggtgcgtggggagaagcgcgcgagcactcgcccatccttgcccagcaggaatttttcgaagttccaggtgatatccccaggaaactctgcgccctcgcctgccagcaggcggtacaactggtgacggtcaggaccgttgacctccagcttactgcccagagggaatgtcaccccgtaattcaggctgcagaactcctggatctcttcttctgtccctggctcctggccagcaaactgattgcacggcaggccaagcacggtaaacccctggtccttgtactgctggtagaggttctccagcgcggcgtattgcggggtcaagccacatttggaggccacgttgaccaccagtaccacttgccccttgaagggcgccagcggcagctcttgtccgtccaaagctttgagtttcaggtcgtggaaagcactcatgacgaactccagatatcccatgttcttcgcattgcggcgcttcgagattacaactcacaagcctgcaatcatagacgccgattgcaaaacgcgcctgcgagttactgagcggtaggccagggcagaatcggaatcgccgtcacggcattctgcgggctgccttcgatcaggcggtcgctgtacaccaggtacaccagggtgttgcgcttcttgtccaggaagcgcaccacctgcatggtattgaacaccagggaggtgcgctccttgaacacttcgtcgccgtccttgagttcgcccttgaagcggatcgggcctacctgtcggcaggcgatcgaggcttcggcgcgatcttcggccaggcccaggccgcctttcacgccgccggtcttggcgcgcgacaggtagcaggtcacgccatcaaccttggggtcgtcaaaggcttcaaccacgattcggtcgttggggccgacaaacttgaacacagtggacacctggccgatttcctcggccgaggccagcaacggcatggccagcagcaggccgaacaatcccttcatgacacgcatggtgtattcctttggttagaccaggatcaggttatcgcggtgaaccagctctggctcagccatgtatcccaagagtccgacaatcgcatcggaggattgtccaataattttctgggcttccagcgcgctgtagttggccaggccacgggcgattcacgaccgtcgggctaggaaaagaggcgacgcggctagattgaactagccctccatagcatatttttctataagaacaagaaaatataaatcgtctagaaatataaacatttggttaatgcaatactttacagaaatcaaaaacacacactaaaacaatgagttacacaaaaaaacaaaatgataaaacataaggactacaagcgaaaaagataaaagccacacaacaataagaattaggctataaaaaaacgtcacagaactcacatcctcgaaacagcaaaaccgcccaaaacatccaaagatatatttagttacatgacgcaacttgcccagacaactagcacaaacaagtatgtaaaacgcaaattcagcaaaaccccacaccacacacagaatgaaaaagcaaataccttatggcataacagcaatacttctgggcttctccaccatctctgacgcagcaccaagcatgaagtcaagtcatccggaacaagcaatagaaagtacgtcattaaacagggccaactcagtacccctaacgtcaacgctggaggatcacttcatagacgaatacaaaaggctaaacgcatcttgcaactaacaaagctaacgcgcgcggagagctaatgaattcaacgcagacgctctccgcttgctatcaaaacgaaggaacgtatatggacaattgcacccaaattaaaaatcttatttttcacgacgcggagggcaacagaattggattaattgccccttcaactttctactgcatatatggtggttgcacatatataaatggcccaaagaaagtaattaagttacacgaacaaaccattgaagctttaaccgaaggattacgacaatcaggatcgttgatagagggtgatcataaagacattgaaaaattattatcattgctcgcaaaccctattagcagccggaccgctagctttttcatgtgtgcaaatcaaaatggcaaaaaaataattgacgactttaagtccatagaaaattcaaacctcttaatcgtaggatgcggaggcataggcagcacggcggctttgctgttagctggctgcggagtcaaaaacataacattagtggactccgatattatagaaaaaagcaatttaaaccggcagttattctggaaacttgaagatataaaaaaacccaaagtagaagtattaaaaaaagccattgaggaacgatttgaagacacaagcatcacgaccctacagactcacttagacctcaacggactaagacaacttgttggaaaaaagaaatttagcgtcgttttagttactgctgatgacccaccaacaatgtcggctcagtgcgcagacctagtaaaacactctgaaacaccattcgtgagtggtggatatctacacggacaatgtgctgttaattttttccctgtatctcttcacgaagaactccgtgaaatccacccaaatgcaagtaaatggaaaaagcttaatccgtcaataatgcccagcttcgggcccaccaatatgaacattgcatcgttattagcgtccggggcaatttcttttatagcaaaccactcactcccactaaaacatcatacatcaattcaatggaatgcaagcattgcacccagctcattcagaacattcactgatgaaaaacaacactaaccaagagaaaacatcatgaatattataaaatcaatacatatggcgctaggtttactgatagctaccagtgtaaatttatcaaatgcaaacgacctcgtaactgatacttcaacctcacatgtactaacaattgtattcacccctcctaaaggtatggagcgcgagttttttgaaaactttgtgcaaaaccaatcgaaatacatgcgtatttactcgggaaagcaaaaacaaaatactcaagtgataaatattgcaccaacaaccctaggagaaccgcttatacatctaataatctataataacaaagcttcatttgataatgcgaaagacatatttcgcagcaccgaagtttttgcgaactacatgcaaaagcactcttcccgattcggaaactacgaaatatcaaaaccgtacctagagaactcaaacgtttattttggagaggtgataaaaaactaaaatatgcgaacagtaggtccaacatgaaacttaccaaaaccgctttctatagcctaatgctatgtagcttagccaactcatcagttgccgacagcattgtaaataacctaacgattataaatagctgcataaactgtcatggtataacaggaagcaactcaaacgaaataccacagttccataaaaaaaacgaggagcaattaacacaaatactgatggcctataaaagcaaaaatacaaaagggaccatgatgaatagagtcatggagcaatatagccaacaggacataaaggctatagctattatttttagccaggcgaaccgctgagtatgattcagcgtttactcttgcgcttccacaaactcggagttactccactatgactaaatcacgcagagacgctataaaattaattctggctagtcttggctacgcccttaatacttcgggcgccgcaacagaaaaagctcagattacagcctcaaaaaaaatagtcatcattgggggtgggtttgccggagccacacttgcgaacactctacacgcgctagataacacactccatataactttaatcgaaccaaataaatactatcattcatgcccactcagcgccgagtacttagtaggtaagcgcactaaagaatcgctaacatttagctacagaaacctgtctaacgtaaaatcaattcatgttattcacgatactgccacgcatattgactatgaaaagaaaacaatactaacgaaacgttctggcagtcacagctatgaccgatgcgttgtaggtattggcgtaggctacaagtttgactcaattgaaggttatagccctgaagtttccgaacaactcccacacgcatggtcaggtggagagcaacaagcgatcttaaaaaaacaacttatgtcgctacgagacggcggaacggtattgatttccgcaccttcaggcgactacaaatgcccgccaggaccatacgaaagagcaagtctaatagcggaatttctaaaaagaaacaggcgccgatcaaaaataattatattggatggaaaaagtgattttcctaagcaagagctttttgaaaaagcatggagggagttgtatggctatggaacatctaacagtattattgagtggatcagttcggaaaagggtggcattgtctcagccgtcaatccaagaaacagagatattctaacttccgctggaactattagagcggacatattgaatatcatcccccctcaaaaagccggcacatttgcacatttcaacgacctaaccggacctcatggctggtgtccaatcgatacgaagacttttgagtcatcgattaaaccttacgtccacgtaattggtgacgccgcctacgctgaaatgcttcctaaatctgcattcacagcatgcgttgaagcgcgagtctgcgcagtagctatttactgcctattcaacaatcatcctattccatgccctcaattcatgaatgtttgttatagcttatgcgcggagaactacggaatatctgtattcttacgttatgaaagaaacataaaaacaaacatacttgatataaaaaacctagtaaagacccccctgaactctacaaaagaagactatcgaaaagaatcccaatttggctatagcatgttcaatactatgacagcagaagcatttgggtaacttcactcaggaattcaatatatgctattagacctttcatccataagcaaagttagctaccccgactttattgctttaatgaagcaagataacactccacctggcggaatagaaactttaaattattggataacaaaaggaaaaatccatcggaaatctacaattctagatttagcttgctctacagggtttagctcaagatattgctttcagcagacaggagcaaaatctattggcattgacatctctcttgactctatcaacgtggccaataataaagttagggaaatgggggcagcagcatgcgtgacgtttctaaatatggacgcttgcaaattatctttcaaagatgaaaagtttactcacgtattagcagggtgtaacttcgcattcatccaagaccgttcaatagctcttgacgagtctcttagaacactgtctaaaaatggggcaatttgcgtttcaaacttttattataggaccccaccgccaaatgaaatactggaggaagtccgtcattccattggatttaaaccaagtcataactggacctacgaatattggctaaactttttccagtctaaaggcttaaagctttcttatgaacataattataatctagcctccatccctgaaaccgtactccacagatccatagaacaatatatacacaaggaaaacacttttacatccactttaattccagagttcaagaatgaattttttcaaaaattttatagcataaaaaaggcccttaactctcagcgaaattaccaaggagtgtcagtacagatatggcacaagccctagcccctacacgcgtgagaaacgctatatctcggatagctcaagatcactctttagatgatgcctttgtagtcattgatatggttgaggttctggaaagagctatttctttcaagtcatgtgcagaaaagcactttaaaaatattgaaattgcatactcatataaaactaacaacctatcctctctttgtaatgcattaagccaaaaaggcttttccgccgaggttgtgtcgttggatgagatgcattgcgcgatagctgacggatatcttttggataagatactttttgatggaccttacaaaaaatattcggagttggagtttgcaatatcgcacaatgtaaggatacaagttgacaacatatttgaactagaaaacatatattacatatgcaaaaagtcaaataaaacagcacaaatctcgctgaggctttcgcaccactaccgccttgcccagtctagatttggattaaacaagcaggagttacacatagccctaagtaacaaaaaatacactgacaataatcatataaacctcaaaggctttcatcttcactctggctctaaccttaaagatacagctagtattgaaaatactcttaccgaatatgcagacattattcttcgatatatgcctgaagatggatggcttgacctaggcagtgggtttcctgcagattcattttcttcagacccacaccaacctacacctactgtagattcatttatgagaaatcttaaaactgagcttagtaggctattcaaaagcgcgtatgaaaattggaaaattatatttgaacctggacggtgcctggtagaggactgtggatatttcgcaacgaaaatagtcagttcaaaaaaaagacttgatacaaccatcctgcaaagcaacatcggtataaattgggttccatcagtacacaactgggctcactccattgaaccaatcacacccaatacgactttaccaccaaacaagcaagtcattagcggcatcaattgtttcgaatcagactacatttgtttcgacttcaacaaagcgaaaatcgatataggtgactaccttcttgttcgcggctgcggcgcttatgacttacaaacatcaaatatttggacccgatgcggtgtcagagtttactcgatattctcccacggctgcgtactgtccagaacccaccaaaaaagcgaaagtctgcgaactcgcgacgtaccgactttaaacacaaaaattgtgatttctcagtctttacatttgcttgaggcaaatcaaatatattacaaagagctacataatttaatcatagaaaacaaattttatctaagcgagtttcttgactggcctaagttcataaataccgagacggacaccctagagtttttagccaacgcagcaatacagcataaaaggtcatcctcaaaaacgtttatcatttcctataacaaccaatgcacaggtgtaatctctttcaacaccatagataggcataatcaaacagcagagattggatactggatctcacagaacaatgaaaaaaaaggaatagtttcctctgcactaaaacacctaatagaaatgtattcaaaagacaattacataatgcgattcgtaattaaatgctcaaccgccaacatcaaaagtaaccgcgtcgcgaagaggaacggatttaaacttgaggggaagttatttaaagcagaaaaagtcaacgaaatcttttatgaccagcacatttactcgaaaacgatgcatccctgacatcgttaacccaaatattctctatgagcttataaagctactgctaagaagcacgcagccttaacttatccattagtcacgttcggtaggccagggcagaatcggaatcgccgtcacggcgttctgcgggctgccctcgatcaggcggtcgctgtagaccaggtaaaccagggtgttgcgcttcttgtccaggaagcgcaccacctgcatggtcttgaacaccagggaggtgcgctccttgaacacttcgtcgccgtccttgagttcgcccttgaagcggatcgggcctacctggcggcaggcgatcgaggcttcggcgcggtcttcggccaggcccaggccgcctttcacaccgccggtcttggcgcgtgacaggtagcaggtcacgccgtcgaccttggggtcgtcaaaggcttcaacaacgattcggtcgttgggcccgacaaacttgaacacagtcgacacctggccaatttcttcagcagaggccagcagtggcatggccaacagcaggccgagcaatcccttcatcacgcgcatcgtgtgcttcctatggttagaccaggatcaggttatcgcggtgcaccagttccggttcagccatgtaacccaatactccgacaatcgcatcggaggattgtccaataattttctgggcttccagcgcgctgtagttggccaggccacgggcaatctcgcgaccgtccggcgccacgcacaccaccatctcgccccggcggaagctgccctgcaccaacttgacgcccaccggcagcaggctcttgttgccttgagacaacgccgacacggcaccctcgtccagcaccagcgtgccacgggtttgcagatgaccggccagccactgtttgcgcgccgcgagcatgccgcgttccggtgacagcagcgtaccgatgcgttcaccggccttgaggcggtccagcacacgttcgatgcgcccaccgacgatgatggtgtgggcgccggaacgcgccgccaggcgcgcagcgcgcagcttggtctgcatgccgccacggcccagggcaccaccaacgctgccggccacggcgtccagcgccgggtcatcggcacgggcttcgtaaatcagttgagcgtcgggattgttgcgcgggtcggcgtcgaacatgccatcgcggtcggtgaggatcaccagcaggtcggcttccaccaggttggccaccagggcggccagggtgtcgttgtcgccgaagcggatttcgtcagtgaccacggtgtcgttttcgttgatcaccgggatgaccttgagctccaccagcgcgcgcaaggtgctgcgggcattgaggtagcgcttgcggtcggacaggtcgtcgtgggtcagcaggatctgcgccgtgtggcgaccgtgctcggcaaagctggattcccaggcttgcaccaggcccatctggccaatggcggcggcagcttgcagttcgtgcatcgcgctgggtcgcgcggtccagccgaggcggctcatcccggcagcaaccgccccggacgacaccagcaccaactccacgccagcctcatgcaaggccaccatctgctcgacccagacgcccatggctgcgcgatccagccccttgccatccgccgtcagcaacgcactgccgatctttacgacccagcgctgcgcacctgtcactttgctccgcatcatcttcaaccttagattgagggcagcgcgacccagcgcggcccataacgttaaacccggatactaaaacgccgctctataaggagcggcgttcaagtttatcgcaacgaatcagtcgcgcacgtaaatgatttcaggaccgtcttcatcatccacgtcttcttcgtcccaatcgtcgtcgccgatgtcatggaccgacttcacgccgctgcggcgcagggcgcgctggtcatccagagcctgcagttgagcgcgggcttcgtcttcgatgcgctggtcgagttcggccagttcggccttgaacaccgggtcggccgccaggcggtcggcacggtcttcaaggtagcgcatgatatcgcgggtcaggcgctcggtgccttctttggcaatggcagagatcacgtagaccgggccttcccactccaggcggtcgacgatttccttgacgcgcgcttcgtgttcttcttcgaggatctggtcgcacttgttcagcaccagccaacgatcacgctcagccagggacgggctgaacttggtcagttcgctgacgatcacttcggcggcatccggtgcactggtgtcatccagcggcgccatgtccacgaggtgcaacagcaaacgggtacgcgacaagtgcttgaggaagcgaatccccaggcctgcaccatcggaagcaccttcgatcaggccgggaatgtcggcgatcacaaagcttttccaacgatcgacgctgaccacacccaggttcggcaccagggtggtgaacgggtagtcagcgactttcggcttggcggccgacaccgagcggatgaaggtacttttaccggcgtttggcaggcccagcaggcccacgtcggcgagtactttcatttccagcttgaggtcacgctgctcacccggcttgcctggcgtggtctggcgtggcgcacggttggtactggacttgaatcgggtgttacccagaccgtgccagccgccctgcaccaccatcagcttctggccggccttggtcaggtcgccgattacttcctgggtcgcggagtcgatgatcgtggtgccgaccggtacgcgcagtaccaggtcttcaccttttttaccggtgcagtcggtgctgccgccgttggagccacgctcggcatcgaagtgccgggtgtaacggtagtcgaccagggtgttgaggttttcgtcggccatcatgtagatggaaccgccgtcaccgccgtcaccgccgttggggccaccgttttcgatgaatttttcgcgacggaaactcatgcaaccgttaccgccgtcgcctgcttttactcggatggaaacttcatcaacgaacttcataacaaaacgcctctcgccgcttggacgagcttaagaaaccaagacataagactcttgcaaaaatgagcgcagcgacctcaatcagcgaccgcaaaaccagcgcctgagcccattacaaacagctttgcaagagactcaccccacaaacgaaaaagccccgtcgcaagacagggcttttccagcgatctcgcaattaagctgcgacaacgctcacgtaacggcggttgaacgcgccttttacttcaaacttgatcacgccttcgattttcgcgaagagggtgtgatctttacccatgcctacaccgtaaccggcgtggaattgggtgccgcgctgacgcacgatgatgttgcccggaatgattttctggccgccatacatcttaacgccaaggcgtttggcttctgagtcgcgaccgttacgggtactaccaccagcttttttgtgtgccatgagtcaattctcctagtgaggaattaggctgaaattaagcctgaataccggtgattttgatctcggtgtaccactggcggtggcccatacgcttcatgtggtgcttacgacgacggaacttgatgatgcggactttatcgtgacgaccttgggagatcacttcagccacaacggtagcgccagcaacaactggagcgccgatgttcacgtcatcgccattggcgaccaacagaacgcgatcaaaagtaacggattcgccggtagcgacttccagtttttcgatcttcaggtattcacctggggcgactttgtattgcttgccaccagtaacaattactgcgtacgacatggtatttctccgataatcctgctcacccagcgctttataagaagaggtattggctggcatggctgcatgggatggacgtcccgaatgcaattgcgtaaggcaggtgctgcccaggaagttcagggtgcgcgattgtacgcaaggcaacggggtgttgcaagaggccgtctatcgcgccttgacactacggggcctgggtcctagcatgccgcgcaacccttctggagcgactgtcgctgatgcaaccccaagctttctaccgcgcggtcgcggacgattttagcgccgtcgacggcatcatcaagaagcagctgacttctaaagtgccgctggtctccaaaattggcgactatattacgtcggcgggcggtaagcgcctgcgtcctttattagtgttgctgtgcggcaaggccctgggccgtgaaggcgatgacctgcgcctgctggcagccaccatcgaattcctgcacaccgccaccctgctgcatgacgacgtggtcgacatgtccggtatgcgccgtggccgcgagaccgccaatgccatgtggggcaacgcccccagcgtactggtaggcgatttcctttactcgcgctcgttcgaaatgatggttgaactcggctcgatgcctgtgatgaagattctttcacaggccacgcgcatcatcgccgaaggcgaagtgttgcaactgtcgaaggtccgcgacgccagcaccaccgaagaaacctacatggaagtgatccgcggcaagaccgcgatgctcttcgaagcctccacccacagcgccgcagccttgtgcaacgccaccgccgaacaggccgaagcgctgcgcacctttggcgatcacctgggcgtggcgttccaactggtggacgacctgctcgactaccgtggcgatgccgaaaccctgggcaagaacgtcggtgacgacctggccgaaggcaagccgaccttgccgctgatctacaccatgcgcgaaggtacgccggaacaggccgccctggtgcgcaaggcgatccagaaaggtggtatcgaagacctcgaagccatccgcgccgctgtcgaagcgtcgggttccctggactacaccgcgcaactggcgcgtgatttcgtggcgcgtgccatccagtgcctggaagccctgccagccagcgaataccgggacgccctggtcgagctgagtgagtttgcggtcgcccgcacgcactgacgcggacgaatgtgggaggggctcctcccacatttagatttcatacaacctgtaagaccacaaatccctatataatgtgcgacttttagccatcctgactttcaaggagctttagtgagcacgttgccaccctgcccgaaatgcaattccgaatacacctacgaagacggcgcccagctgatctgcccggaatgcgcccatgagtggtccgccactggcgaggccgaagcggccggcgatgaagccgtgaagaaagactctgtgggcaacgtcctgcaggacggcgacaccatcaccgtgatcaaggacctcaaggtcaaaggcacctccctggtagtcaaggtcggcaccaaggtcaagaacatccgcctgtgcgacggtgaccacgatatcgattgcaagatcgacggtatcggcccgatgaagctcaagtccgagttcgtgcgtaaagtctgaacccgctgcacccatcccgcgcccgccgcgggatggcgtttcgccctctgcgttgacctctcgcaatatccacacagaaaaacccggaaatcgccaataggcacttgctattctacgaataagaattattctcattgaaacccatcaaggagatgcgacccatgacttatttgatagatgcctggctggaccgcccacacccttacctgcggatcctgcatcgggaaaccggtgaagtctgtgcggtactggaagaagaagcgctgagtgaactgcaggatcagggcgacctggacgtgaatggcctgagttcgagtgaacctggagtgctgaaggaggtggtgcgtaatctgtttctgttctgctatgcccgagcgttgcgcccggcgacggagctgaatggcaagttccatccatgaacacacccgcaaaacactgtggggacgagcaggctcgctcccacaggtaatcagcaggtcttacagaacgtcgagcagctcgacgtcgaacaccagaacgctgtgcggcgggatgctgccaacgccttgagcgccgtaagccagttcgctcggcacgtacagacgccatttgctgccggcattcatcagttgcagggcttcggtccagccggcgatcacgccgccaaccgggaattctgcaggctgaccgcgctcgtaggagctgtcgaacacagtgccgtcgatcagggtgccgtggtagtgagtacgcacttggtcttcacgggttggcttggcgccatcaccggcggtcagcacttcgaactgcaggccggaggccagggtggtgatgccatcacgcttggcgttttcagccaggaatgccaggccagcgcccgccgcagcttcagcctttgcagccgcttcggcctgcatgatttcacggatcactttgaagctggcagccatttgctcctggtcaacacggcttggcttgccggcgaaagcgtcggtcaggccggccaggattgcgtccaggcttacaccaggtggcggattgtcgcgcagttggtcgcccaactgacggccgataccgtagctgacgcgggtttcgtcggtggacagattaacttcggacatgaagaggctccgctgtagggcgacacagtttcccgtgtcatccaaaactaaaagggcccgcagactagcacaaaaccggcgcgcacgatgagcttggcgcctcgtgccggcgggccgccgttagtcggttactcgcgggggcgctcatctattcacgaataaaaagtttcagattcccactcacccgccgatacagcgctacacatcttggctggctcaaacaacaacaccgcccagcagacagacatcacctttgcggagcattcgatgaacagctggttcggtaacatcagcgtcaacctcaaactcggcctgggcttcggcctggtgctggtcctcacctcgatcctcgccctcactggctggaccagcctgggcagcctgatcgaccgtagcaactggatgagcgacatcacccagctcaacgcgtcgctgaccaagctgcgcatcgtgcgcctgcaatacatgctcgccaacggcgacgaggccgtggcccagaacgtacagaccaacctggatgccttcgctgcccagcaacagaaactgctggacagcttcaagagcccggagaacgtcaagctgctcaacgagcagaaagcgatcatcaccgcttaccagcagtcgctaaataaaatgcgtgaggcctaccgtaacggcaacgcctctcgccaagtaatgggcgacaaagccgacatcgccaatgcgcagatcaatgcgctggagaacagcgtcaagcaaatgcctgacagcacggagcacctggcccagttccaggccgtggccgacgccaagatgcaattccaattggcgcgctacgaagttcgcgggtacaccggtaacgtcaacccggacaccgaagcccgtgccgccgcacagattgaaaaagccatcgccggcttgaaagacctcagcgccgctttcggtagcagccaacagaacgcactgacctcgctggaaaccgctctgggcgcctaccgcactgccgtgcagaactacaaggcggccaatgccaacatcgtcaccgcccgggccgaaatgaccacccaaggcgccgatatcgtgaccatcagcgacaagctgtacgacattcagctgaaccgccgcgacgccgaaagcgcccaggcccgcagcctgcaattgatcagcaccttgctggccctgctggtcggcgtgattgccgcgctggttatcacgcgccagatcacgcgcccgatccaggaaaccctggcagtggtggaacgtatcgcttccggcgacctgagccacaatatccagattacccgtcgcgatgagctgggcgtgctgcaacaaggcatccagcgcatgggcaccaccctgcgcgaattgatcagcggcatccgcgacggcgtgacccagatcgccagcgccgccgaagaactgtcggccgtcaccgagcagaccagtgccggcgtgaacagccagaaaatcgagaccgaccaggtcgccacggcgatgcacgaaatgaccgccaccgtgcaggaagtcgcgcgtaatgccgagcaagcctccctggccgctgctgacgccgatggccaagcccgtgccggcgacaaagtggtcgctgaggccatcgcccagatcgaacgcctggccgctgaggtggcgcgctccaccgacgccatgacccatctgcaacaagagagcaacaagatcggcagcgtgatggacgtgatcaaggccgtggccgaacagaccaacctgctggccctcaacgcggcgatcgaagcggcgcgtgccggtgaagccgggcgtgggtttgccgtggtggccgacgaagtacgtggcctggcccagcgcacgcaaaaatccaccgaggaaatcgaaggcctggtcgccggtttgcagaacggcacccagcaagtggccaacgtgatgaacaacagccgcagcctcaccgacagcagtgtcgagctgacgcgcaaagctggtgtgtcgctggagaacatcacccgtaccgtgtcgaatatccagtcgatgaaccagcagatcgccgccgccgccgagcagcaaagcgcagtggctgaagagatcagccgcagcatcgtgaatgtgcgtgatgtgtcggagcagaccgctacggcgagtgatgagacggccaagtcgagtgtggaactggcgcggttgggcagtcagttgcagcagatggtcagtcatttccgggtataaaagccgcagtccctgtggcgagggagcttgctcccgttagggcgcgaagcggccctgatcaagttgatgcagatttgaagttgagagcgcagtgaatgcttggggctgctacgcagcccaacgggagcaagctccctcgccacaggcaaacttagacatactcggccctccgtgagttgggccttacctccagcacacttaccggaacacgtgggccttcggacgcgagtcgattgcgtcctttgagagtgcaaccccagccactaactggtgttgcaaaaaaaaccgccctaccaaggcggttttttattgcctgcgatttgcccctcagccctcaccttcctcaacaaacaccagccgattcccaaacgggtccttgatgctcatctcccgcgcgccccaaggcgtttcctcaacccctggcttggcataccgataatccttgcccaccaattgctgctgatacgcgtccaccccctgggcctgaatccgcaccgccgcgcccggcgacgcatcgccatggtgctcagtcaaatgcaacacgcattcacccagcgacacttgcaggtacaacggaaaactcgcttcaaaacgatgctgccaatccaccttgaaccccaaaaagtcgacgtagaattccaacgccttggcctcatcgaaaatccgcaggatgggggtgacttttcctaagtgcatggcaatcgctccgttcataagagcgcccactataaagacgaaaatccccgacgcaaatccccactgcgcgccaggaaacgcccctgccgctgaccgttcgcctgcccgtcgcagtagctcaacactccgttgacccacaccccatcaatgccttccgccgcccgctgtggttgcttgaagtccgccacatcgcgcacgcgcaaagggtcgaacagcaccaggtcggcccagtgcccttcgcggatttcaccgcgctcggccaggccaaatcgcgccgccgacaagccggtcatcttgtgcacggcagtgtgcaacgggaacaacccgacatcccggctgaaatgccccagcacccgtggaaacgcaccccacaaacgcggatgcgggaacgggtcctctggcaacccatccgaccccaccatcgacaacggatgcgcgagaatccgccgtacgtccgcctcatccatcccgtaatacactgcccccgccggttgcaggcgacgcgctgcgtccatcagcgaaacatcccactcagcggcaatgtcctgcagatcacgcccccccatgtccgggtgcggcgtcgaccaggtgatggtgatgcgaaacgcatcggtcacctgcttgaggtccagggtcgaagaactcgcagcatagggataacaatcacagcccaccgggtgggttttcgccgcccgctccagcgatgccaacaactgcggactacgcccccaattcccggcgccggcacatttgaggtgggaaatgatcaccggtgcctgggcatgtcggccaatcaaaaacgcctcgtccatcgcctccagcaccggctcgaattcgctgcgcaaatgggtggtgtacaccgcgccgaaggccgtcagttcttcactcagttgcagcacctcatcggtctcggcgttgaacgcgctggcgtaggccaggcctgtggataaccctagggcaccggcttcgaggctttcttgcaactgcacgcgcatggcggcgatttcgtccgctgaagcgctgcgatgcaggtcttgcatgtgattgctgcgcagtgccgtgtgaccgatcaatgcggcaacgttgaccgccgggtgagcctgttcgaccgctgctcgatagtcagtaaaacgcggatacacaaacgccgcagcgctgcccaacaggttcatcgggtccggcggatcactgcgcaacgtcaccggcgacgcactgatgccacagttgccgacaatcaccgtggtcacaccctggctgagcttgggcagcatctgcggatggcggatcaccaccgtgtcatcatgggtgtgcacgtcgataaaacccggcgccagcacacgcccctgagcgtcaacctcatgcgcgcccgatgcgctcgacaaatcaccaatcgcctcgatacgtccggcgcgcagccccacatcggccacatagcctggggtgttgctgccatcgatgatcaatgcctgacgaatcagcgtgtcgtacttcatatcagtctccaagcggcaggctgtcaggcccgccgcgataatcgtccagggccagcttgatccggcgcaggcgttcctgattgccatccggcgaggccagagccaactcggtggcgagcaggtcgatagccagcagcatgccgtagcgggcggcggtgggcttgtagataaaactggtttcggccggctgcagcggcagcagcacatcggccaattgggccaagggcgagtcggccagggtgatggcgacgatgcgcgcgtcgtagttgcgcgccaacgccaccacgtccagcagttcgggggtgaggccagtcaaggaacacacaatcaacgcatgctcaggccccagcgtcgccgccgtaacccgcatcatcaccgggtcatggcaggccgcaatcggatagcccaggcgcaccaggcgcacctgcaactcatcgctgcacaggctcgacgggccgcccatgccgaacgcatggatcatccgcgccttgcccaacaggctgaccgcatcgacaaaactggcctggttgaatccggagagatgctgacgcaacgtcgcctcgatatcccccaggatctgccgatgaaacgccgactgttccggcaaccccgccgggtcgaggaagcgactgccgacgccgctggcctgggccagttgcaggcgcagatcacgcaagtcccgacaccccacgctgcgcgcaaaccgtgacaacgtggccgtactgacctcggcccgttgcgacaacgcttccaggctggccgacgcggcaaaccccacgtcatccagcatcagcttggcgatacgcccttcgccggcgctgaaggcgtcctggcgagcgcggatctggtagaggatgtccatgggctctccgggttacaaaatacaggacagaccataagtcagaccgaaggcgaccaccgaaatcaacgtctccaacacggtccaggtcttgaaggtctggatcaccgtcatattgaagtattccttgatcagccagaagccgccgtcgttcacgtgggaaaaaatcaccgaacctgcgccggtggccagcaccagcaactcagggtgtggataacccaggcctagcgcgacgggcgctaccacaccggacgcggtggtcatggccaccgtggccgaacctgtggcgatacgcatcagcgcggcaaacaaccagcccatcaccaacggcgacaggtggaaggcatgggccaggccgagaatttcgttagtgacaccggcgtccaccaagatgcgattcaacccgccgcccgcgcccaccagcaaggtgatgctcgcggtcggcgccaggcattcattggtgaacttgaggatcgactcacggttgaagccctgtgcaatccccaaggtccagaagctcaccagggtcgccaccagcagcgcaatcaccgagttgccgataaacagcaggaactggttgaaaccggtgcccggcgtagagattacattggcccagccaccgatcatcatcagcaccaccggcaacaggatggtgcccatggtcagggaaaagctcggtaaacgggtacgcggttcgcgctcgatgaattggcgttccagcgggttttccgccggcagatgaatacgcggcacgatgaacttggcgtagaccgggccggcaatgattgccgtcgggatgccgatcaggatggcgtaaagcacggtctgccccaccgacgcgttatacgccagcaccgccatcatcgccgccgggtgcggcggcaccagcgcatgcaccaccgacagaccggcgaccatcggcagcccgaccatcaggatcgacacgccgaccctgcgcgccacggtaaaggcgatcggcaccagcaacacaaaaccgacctcgaaaaacagcggcagccccaccagaaacgcgatgcacaccattgcccaatgcgcgttacgctcgccaaaccggttgatcagcgtgcgcgccacctgctcggcaccgccggactcggccatcatcttgccgagcatggtgcccaacgccaccaccagggcgatatgccccaaggttttgccgacacccgcctcgtaggaacccatgatggtgtccgccggcatcccggccatcagcgccaggccgatggacaccagggtgatgacgataaacgggttgagtcggtaacgtgcaatcagcacgatcaaagcaatgatggcgatggcagcgtatgccaacagcccgaagcccggtgatgcggccatgcggtactcctcggaaagggtcacgtcgaattggttgtgaaactcataaatcattaccgaggattattttcaatttttatgaaagtaactttcgcccacaggtaagcgctgtcgcgttgggatatgcccgacaggcgtgaatgaaaattcgaggggtgttcttacatgaagatcggaggatgccggaaactcaagcgcagccgttgagtcttagaatgcgcaacccttcatcatcaggaaatcgaccatgattcgcacagccttcgccgccagcgccctgctcctcgccctgtgcggcaccgcttcggccgccgacaacccagcgctgaagaagtgcatggacagcgccaacaccaccgccgacatggttacgtgcaacgccaacgaagccaaggtgcaggacgcacgcctgaaccgcgcctacaagaccgccctcgccgcccaggaaggcccgcgcaagcagcaactgcaagacgtgcagcgcctgtggataaaataccgtgacgccaattgcgccttcgccggttccgccaccggcggcagcatcgaccgggtcaacggttccggctgcgtgctggacatgacccagacccgcgcccaggaactcgaagacctggtcgggccgtagtcagtcagtcgtggtgaaccctggcgcgcttgagcagcttcttgcaacgctccgacagatgcagcacccgcaggtgcttgccggccttgctgtagcgctcgcgcaaggtcatcaacgcggcaatcgccgagtagtcgacaaagctcaggtgacggcaatccagcgtcacctgggccgggtcgttggccgggtcgaactggttcaaaaacggcgtggtcgaggcgaagaacaacgtgccatgcaggcgatagagcttgctgccatcggcctccagatgctcatcggcatatagctcgcgcgcttgctgccaggcgaaattcaacgccgcaatcacgatcccgcacagcaccgccgtggccaggtcggtgaacaccgtgatcaccgtcaccgccagaatcaccagcacatcattgagcggcaccttgttgatcacccgcaaggaggcccaggcgaaagtctgctgggacaccacgaacatcacgcccaccagcgccgccagcggaatgcgctcgatgaacggcgacaggaacaggatgaacaacagaatcatcaccccggcaaacaccccggacaaacgcccgcgcccgccggagctgaggttgatcacggtctgtccgatcatcgcgcagccacccatgccgccgaacaggcccgagaccatgttcgccgcgccaagggccacgctttcacggtcggggtagccgcgggtctcggtgatttcgtcagtgaggttgagggtgagcagggtttccagcaggccgaccatcgccatcaggaacgcgtagggcgcgatgatgccgagggtttccagggtccacggaatctgcggcagcgccaaattcggcaggccgccggcgatgtgggccatgtcaccgagggtgcgggtcggcaggccgagcaggtacaccgccagccccacgccgaggatcgccaccaacgcaggcggcacggcgcgggtgatgcgcggcagcaggtagacgatggccatggtcaccagcaccaggccggtcatcacgtacaagggcgtgccgctgagccaggtttcaccacttttgaaatgctccaactgtgccagggcaatgatgatcgccaggccgttgacgaagcccagcatcaccgggtgcggcaccatgcgcaccagcttgcccaggcgcagcaggccgaaggcgaccatgatcaagccgcccagcaacaccgtcgccagcagatactccacaccgtgttgcaccaccagcgcgacgatcaccaccgccatcgagccggccgcaccggacaccatgccgggccggccgccgaacaacgcggtgagggtgcagatgatgaaagcgccgtagagccccatcaacgggttgaggtgagccaccagggcaaaggcgatgcattcgggcagcaacgcaaaagacgtggtgaggccggccaggacatcggcgcgcagacgggtgaggttcatgaagtaccagggtaatgcggggataaggcggggaatggtacggaattgagggagatggagctagtctcgaagaccgagtcgtgccaatcgggggcaagccccctcccacactagactgcactccatagttggaactcggtcaactgtgggagggggcttgcccccgatagcaacaccctggggatcaagtgaacatcacaccatttcgtggcgaatccactccaccaccgacgtacgcttcggcgcccagcccaacagttcacgggcctgcttgccgcgcacccggctgttggagcccaagccatagttggccatttcatagccccactcggcttcagcgtcggccaatggccaatcctgcggtttgcccaggttcagcgcttcggcgatggcggtggtcatgtcgataaacgcggcctcgctgctttccacgaagtagaaagtaccgggcacattcttggtcagagccaacaggtacaacgccaccacgtcttcgatgtgcacgttggaccagatgttctgcccggtgcccacgtggcgcactacgccgcttttacgtgcttgtttgagcagacgcggcaattgcacgctgtcgcgcttaacacccaggctgtggccgtagatcagggtgttgcagatcactgccgaattcacgccatcattggccgccgcgaggatcagattgtcgatggccacacgagccgccttgtcgaccgtcggctccggcaggttgccctcgaagtagatgacatcgctggccttgccgcccgacgcatccccgacaatgctcgaaccgctggtgtgcaggaacaccttgttcgagcccttcaacgccgcgagcagagtttccacggcagcacggtggtcgctgctggcggcgttgatcaccgcgtcggcctgttgcgcttgctcggtcaatacagccgcgtcatccagggtgccgatcaccgggttgatgcccagtgcggtcatctcggcagcctgctcggcgctgcgcaccaggccggtaacggtgtggccggccttaaccaggccggtcgcgatggaaccgccgataaaacctgctgcgccggtaatgaatacgttcatggaagactctcctggctgggtaagtgatggacccagtatcaaggcgtcatccctgacgaataagcccctggcgcccaattcactcttgcgctcaggtcacgaatcagcaggcataccgcgccagcttggcctggataaagtccaggaaacactggatacgcaacgccagctgcgagttgcggtagaacactgcgtggatcggctggcgatacccgctgttgaacgcctccagcaccggcaccaggcgcccggtctcgatatcgtcaatggtcatgaagttcgacaggcagcagatgccctgcccctccagcgccaactggcgcacggtttcgccgctggacgcggccacgccgggctggatcagccagcgatcgccctcaacatggcgcagcggccagtggttgagggtttcggtctgggtgaaccccaacagcgtgtgatcggccagctcggccaccgtggtgggcgtgccgtattgcttgaggtagccggggctggcgaggatatgcagcggcgtacagccaagagatcgcgcgtgcagggtcgagtcagccagggcgccgatgcgaatggcgatatcggtgctctgttccagcaggtcgatgatcacgtcatcgctgttcaactccaactggatatccgggtagaggctacgaaactcggcgatgtacggcacgatcccatgcagcatgaacggcacggcagcgttgacgcgcaggcgccccgccggtttctgctggcgtgatgacaggcgctcttccagctcttccatctgcgccaggatcaccttggcctgctcgaagaagtacttgccctcttcggtcaggtccatgcgccgcgtggtgcggttgatcagcgtggtgtcgagcttggcttccaggcgcgacaacgtgcggctgacagccgagggcgtctgcccgacttgctcggcggcggcggaaatcgaaccacattcaatcacgctgacgaagatctgcagctcatcggaccgggctttcacaggcgctcctcgttatcggttcagcgcagcttacaccgagaatttgaacacctgcgccagatgctgctcgtagcgcgccacgtcagcttcgatggccgggcgtttcatcacgtccacgcacaggaacgtgggcaggccggtcatgccgaggaactcgttggccttgtggaacgggaaatacaccgcgtccacgcccttggcttcgaagaagtcggtcgggtcgtcgaaggcttgctgcggcgcgttccaggtcagcgacaacatgtactgcttgccgtggatcaggccaccactgccgtacttctgcgaggcatcagaacgggtgcgaccgtcgctggcgtacaggctgccgtggccttcggtgaagacttcgtcgatgtacttcttgacgatccacggtgcgcccatccaccagccgggcatctggtagatggtcacatcggcccagaggaatttgccgacttcttcggccacgtcgtagccttcgtcgatgtgggtgaccttgacgtcgatgccagcacgatccaacgccgccacagcggtgtcatgcagggtagtgttgtagcggccatcggagtgagcgaactttttgccgccgttgagcaagaggacttttttcatggggtatccagaggggttaacaatgtctgccggcaggctatcgacattgccccctcggaataagcagcggtgaggcaaaatacatttgaccaaaaagcacgaatcacctgcgcattgttaaccactgatcagcagatgggcgcccagcaatgccatgccgatgaaaaatacgcgcttgaacaacaccgcactgatgcgctgacgcactacctgacccaaccacatgcccaatagcgccggcaccagcgccagcaacgacgcgttgatttcaccgccaccgagcgtgccgcgccaggccagccctgcggccaatgccagggtggacacagtgaacgacagccccagcgcctgcaccaactgatcacggttcaggcccagggcttgcagatagggcacggcgggaatcacgaacacaccggtcgccgaggtgatgatgccggtgatcaccccgcacacggggcccagccaacgttcagtcgcaggatttacgttgaacgtcggcaggaacaaaccgctcagcgcatacaccagcaacgccccgcccaacgcatggcccacccagcttcccccgctcatgcccagccacaacgtgcccagcccagtgcccaggaagatcagcagcagcatcggccacaagcgcctgagcaacgcactcaaatgaccaccggacgccagttgccacaggttggtgatcgtcgaagggatgatcagcaacgccgcagcctgcgtcggcagcatagccaggccgagcaagcccatggagactgtcggcaagcccaggccaatcacacccttgacggtgccggcgagcatgaaggtgccgatcaccagcagtgtcagggcggggccgatattttggtagaacgcgaggaaggtattcatggagtgattgtgcggtttttcgatgaggtcgaaaattcgccatatactgaggcagactcttgtttatacagaggctggtgccatgcactttgacctgatagacctgcgcctttacctgcacatcttcgacaccggcaacatcaccgccggggcggcccgcagccatttgtccctggctgccgccagtgcgcgtatccgggcaatggaggcttcgctgggtatcgcgtttcttgaacgtggccgccgtggcgttacccctacacccgccggcaaagccctggcccgccatgcccgcctgctgctgcaacaggccgagcacctgcaacaggaccttgccgaatacgccaacggcatcaagggccaggtgcgcctgctgtgcaacaccacggccctcagcgaatacctgccggagttactggcagactttttgcgcgaacaccccaacctcgacatcgacctgcaggaactgccgagcctgcgcatcacccaggccttgcgccagggcacggcggaccttgggatcatttccgacgcggtagacacccacggcctgcagaccctgccgtttcgcgatgacccgctggtgctgatcacaccgctggatcatccgttcaccgcagggagctttatcgatagcctgcaacacgactttgtgggcctcgccgcccacagcgcgttgacggtttacctcgaagaacaggcattgcacgcaggtttccgtctgcaaacacgcatccgcgccgaggggtttgacggagtgatccgtatggtcgcccgcggcgccggcctgggtatcgtgccccaggcggcactggagcgctggccgctggaacccaccttcaaggccccccccctgcaagaggagtgggcctgtcggaaactgctgctatgtgcgcgctcgttcgaacagctgcccggttatgccaaggccttgttcgacgccttggccctgcccttgcggaagaacccgtaatacaccgccgacaggatcagcaggaacggcacgccaaacaccagggtcatcttgaatgcctcggtgaaataggtggtgatcatcaccgcgcccatcagcaccagccccagcaacgtgctgtagggaaacagccgcagttggaacgacaatttcggcccaccgtgacgcttgcggtagcgccggaagaacaggtgagtgaggaagatcatgaaccaggtgaagatcgcgccgaacatcgagatcgccatcatcagggtgaacgagctttccgggtataccacgttgagcaacgtcgccagggcgatgcccgagctggacagcagcaacgcgttcagcgggatgccgctcttgctcaaggtgcccatggacttgggcgcgaagccggcacgggacaggctaaacatcatgcgggtagtgatgtagagctggctgttcatggccgacaacgccgcgatcaggatcacgaagttcatcacgccggtagcaccgggaatgccgatggtctgcatcaccgtgacgaacgggctctgggtctgcccggcctggttccacggcacgatggccagcatcagcgccagggtcagcaggtaaaacaccaccaggcgcacgatggttgcacggaaagctttcttcaccgcctgttccgggtcggcggcttcaccggcggccacggcgatcatctccacactcaggtagctgaagatcgacacgatcactgcgatccacatgccgctcaggccatgggggaaaaacccctcgtgggccgtgtagttctgcacgccgtactccgggttgccggaaccgaacaccacgtataccgcaaggatgatgaagccgacgatggcgctgatcttgatcgtcgagaaccagtattcgaagttgccgaaggtcttcacgctgatggcattgagcaggatcagcacactggaaaacgacacgatccacacccattccggcacgttggcgaaccagtacttcatgtacatcgccaccgccgtaacctcggcgcccaccgccagcacaatcgccgcccagtaggcgtagcgcaccaggaagccggccagcgggctgatgtagaactcggcataggcgccgaacgagcccgaggtggaatgcgccaccgtcatctccgccaggcagcccatcaacagcaaggtaatcaatgcgccgatggcgtagctcacaagcacgctgggcccggcatacccaatcgcataggcgctgcccatgaacaacccggtgccaatggcgccaccgatggcgatcatgctcatctggccggaagtgagctggcgcctcaggcccagttcgcggtgggtgatctcggcaaagccggtgtctggcgtggtcacgtggtgtgcccctttattattgtgattgcactattgaacggttgtcacagattccctgtgggagggggcttgcccccgatagcggtggatcagtcaacgctgtattggctggcacactgcaatcgggggcaagccccctcccacatttttatctgcgttgtggtcaggtgacgctgttgcggactttgaattgcgcctggtcccaggtgcggttgtcgaggatttcacccaggatttccacagcgtcaaacacctcggtaaagcttgtgtacaacggtgtaaacccaaagcgcatgatgcgcggttcgcggtagtcaccgatcacgccacgggcgatcaaggcctggatcaccgcatagccttcggggtgttcaaagctcacatgactgccgcgccgggcgtgttcacgcggggtgatcagcaccagttcatgagcagcgcaacgcgcctcgaccaatgcgataaacaggtcggtcaacgccagggatttgctgcgcaaactcgccatatcggtctgggcgaaaatctccagcccacattccaccatggccagcgaggtgatcggctgggtgccgcacaggtaacgcgcgatgccggcactcggtgcgtacgtcgactccatggcgaactgccgggtgtggccgaaccagcccgacaatggctgtcgcaccacatccaccagcgccgggttgacccacacaaacgcctgggcgcccgggccgccgttgaggtacttgtaggtgcagccaatcgcatagtcggcaccggcctgatgcaggtcgatgggcaccgcgcccgccgagtgcgccaggtcccagaggctcagcgcgccgcactcatggctcagggcggtcagcgcctgcatgtcgtacatgtagccggtcttgtagttgacgtgggtgagcatcaccaccgccacatcctggtcgatggcctcgggcaattcatccgggctgttcaccaggcgcagggaatagccttgttgcagcagttcggccaagccctcggcgatgtacaggtcggtgggaaaattgctcgcctcgctgacgatcactttgcgatttggctggcgttggcgctgtacgctcaacgcggcgctgagcaccttgaacaggttgatcgaagtggtatcggtgatcaccacttcgccgtcgcccgcgccgatcaatggtgccaggcggttgcccaggcgctgggacaggtccgcccagccagcactgttccaactgcggatcaggccattgccccactcttcggcaatcaccgcctgagcccgtgccaatgccttcaccgggcgggcgccgagggaattgccgtcgaggtagatcaccccctccggcaacgcaaactggcggcgcaatggcgccagcgggtcctgatcgtcgagggcttggcagtggcttcgagtggtcatgggttgtcctggtttttataggtaaggatggaccaaataatgaacgaacttttagagaattttcgtgcaaagtggcgggcaacaggctaattaagctgtaggaaattcgaatttaacccccaaacacgcggatttattctaaccatgattctcgacgccaccgacctgcgcctcctgcatttcctgcaacaggatggccgcatcagcaatcaggaattggccgaaaaagtcgcgctgtcaccgtccgcgtgcctgcgccgtctgcgcctgctggagagcgagggcatcatcagcggctaccgtgcggtgttgaacgcggagcagttggggatcgagctggaggccatcgtgcacctgtcgttgcgccaggatgtggaggattggcacgagacgttcatcaagaaggtgcaaggctggccggaggtcgccagcgcctacgtgatcaccggcgccagcaactatgtgctgcgggtgcaggcgcgcaacctcaagcacttttcggactttatcgtcaaccacctgaaccgcacggcgggggtgatggatattcgctcggagattgtgttgcagaagatcaaggatcgggatgaggtgctggacttggtggtacgcaaataaccgcaacaccatcggtcaaatgtgggagggggcttgcccccgatgagggagtgtcagtggctgaactgttcaatgacacaccgctatcgggggcaagccccctcccacatttttgaatcgcgtttaatcttccagagcgcggactcgctgcatgcgtttctgctccaccggcgcctccgccacctgcagctcaaagtcaaaatcgatctgcgcaaaccgcccttccacgccaaactcctgcgccagttgcgggtcgtcgctgaagcgaatctcggcgatcaactcatcccgtgtcgcataggcaaagtcatcatgcaggtacgggtcatccgaaaggttgatctgcgtggtcaggtgccgatgccccggcgccgaaatgaagaagtggatatgcgccggccgctgcccgtggcgcccgagctgatccagcagttgctgggtcggcccggtcggtgggcaaccgtagcccgacggcacgatactgcggaaccggtagttgccttgggcatcggtctcgatgcgtcggcgcaggttgaactccgattgcgtcggatcgaaccacgagtaagtcccccccgtgttggcctgccacacgtccacaatcgccccggccaacggtttgccgttggtgtcgcgcacctgcccgcgcatgaacagcggcaccgcgtcgtccttgccatcgtccagccgcgcctcgacctttgacagcggcgccccggccacatacaacggcccttcaatggtgcgcggcgtgccgccggatttgccggcttcctcatcggcggcgtccatcagcaagtccaggtaatgctccaggcccagcccggcggcgagcaatccggcttcctggtgcttgcccaactcgttgaggtagttgaccgccttccagaactcttccggggtcacttccaggtcttcgatgatgttcacagtgtcacgcaggatccggtagatcagcgccttggtacgcgggttaccagcgtcgttgaggttgccgctggcttcttcgagaaactgttgggcatgggcagtctgggacagtcggatggacatggtgcattcctcatcttgtagttattcgtttggaaaccggcctagcggtcgtcgtcatggatcgacgacgggtgccggcacagggcgttcacttcgatagccatgtaggggaacagcggcagttgcatcagcaggtcatgcagtgcctgcacgctgtcgacatcgaacacgctgtagttggcgtagtgcccggcgatgcgccacaggtggcgccatttgccttcctgttgcaggcgctgcgccagggccttttcatcggccttgaggctggctgcacgctcggggttcatgtcgagcggcaggttcacagtcatttttacgtggaacaacatggcaggcgcctcttagtgtttgtcacgacggaagaacgccaggcgctcttcatcgatggccaggcccaggcccggtgcggtggagacatgcagctggaaatcgcggtacaccggcggttcggtgaggatgtcttcggtgagcagcaacgggccgaaaagctcggtgtcccacgccagtttgttcagcgtaaggaacgcatgggccgacgccagggtgccgatgccaccttcgagcatggtgccgccgtacaggccgatacccgccgcttcggcaatcgcggcagtacgcaacaccgcacgcgggccgccgttcttggcgatcttgagggcgaacaccgacgcagcgccttcgcgggccaggttgaacgcgtcctcgacacactcgatggattcatccgccatgatcggcgccgggctcgacaggttgagccgcgccatgccgctgcggttattgcgcgagatgggctgttcgatcaggtcgatgccattgtcgccaagcaccttgcacgcccgcagtgccaccgcttcgtcccaggcctggttgacgtcgacgcgcacgctggcgcggtcgcccagggtctttttgatcgcgatcacatgggccaggtcgtggctgacttcaccggcgccgatcttcaatttgaagaggcggtggcggcgcaggtcgagcatcttttcggcctcggcaatgtccttttcggtgttgccgctggccagggtccaggccaccggtagcgcgtcgcgcacacgcccgccgagcagctcgctgaccggtaggcccaggcgtttgccgagggcgtcgagcaaagcgctttcgataccggatttggcgaaggtgttgccacggatgctgcgctccaggcgcaacatggccgcgttgatgttgctggcgtcctggccgatcagcagcggcgcgaagtgacggtcgatgttgaccttgatgctgtcggggctttcactgccgtagctcaggccaccgatggtggtggcttcgccgatgccttcgatgccatcggcgcagcgtaggcggatgatcaccagggtctggttttgcatggtgtgcatcgccagcttgtgcgggcggatggtggggaggtcgacgataatcgtctcgatcgactcgatggcgcaaatcggcatggcaatacccgttgggttctttattggttttagccgattctgtgccgtatttttcaaggcttccaatatagaatgggtctcgcacaataccctaaaggtatcaaaggagccgtcatggaactgcgtcacctgcgctacttccaggtgctgggagaaaccctcaacttcacccgcgccgccgaacgcctgcacatcgcccagccgccattgagccggcagatccagcaattggaggatgagctgggcgtcattttgcttgagcgtgggcgaccgctgcgactgaccgaggccgggcgttttttctatgaacacgccaacgtgctgctggagcaattgaacaaggtctgtgacaacacccggcgcatcggccagggcgagaagacgtggctgggcatcggttttgcgccgtcgaccctgtacggcgtgctgcctgaattgatccgccggctgcgtacccatgaggcgttggagctggaactcgggctgtcggagatgaccaccttgcagcaggtcgaagccctcaaggccgggcgcattgatgtggggttcgggcggattcgcatcgatgacccggccattgtccaacgcgtgctggtggaggaccggctggtcgccgtcctgcccgccggccacccgttgcttgatgcgcccgccaccctcgcccaactggctgccgagccctttgtgctctaccccggcaacccacgccccagctatgccgaccatgtgatcgcgctgttcgacgcccacggcctgagcctcaaggtggcgcagtggaccaacgaattgcagaccgccatcggcctggtcggcgccggcatgggcgtgacgctggtgccggcctcggtgcaagtgctgcaccgcgcagacatcggctacacaccggtggtggaggccactgcgacgtcgccgatcattctcagccgacgggtaaatgaccagtcgccgggtctcagtcattgcctgcaactggtggaagagttgatctagccacgcaggcgccgcgcatcgttgcgctgcaaggtctggctcggcgactcatcgaacagcttgcgatactccgccgagaaccgcccaaggtgagtaaagccccagcccagggcgatttcggaaatggtgcgggtagagccgtgctcgaggatttcctggcgtaccgcgcacagccggtgcttcttcaaataggccatcggcgacagggcaaaatatttgcgaaacgcatcgaacagcttgaaccgcgacacccccgcagcagcttccaggtcttccaggtgcacggtgtcccgagcgttgtcatggatgtactgccgcgcacggatcaggtaatgcggcagtttcacgccgaggacatcgcgcaattcttcggagtagttgttcggctgggccaggatcaggcctttgatcagcgagctttccaggtcgcgggtaaaggcggcctgctcgtataactcgctgccgtgttccagctcggcgatgaagtagcgcgccatgcgccaccaggatgccgaagcaccgtccacggcgtccatcaccgactcaaagcgcagcggcgcctcaatcggccgttgcagcaaaccttccagtgattcactcatcgccgcccgcgtgatcaccacctgcagcttgcggcaatcaccggaaatcgccagcacctgatgctcgttgggcgagatgatcacaccctgatcgcggttggagaccaggcgctcaccgttcgtgctcaactcctgctcgcccaccaacggcaggctcaagctgtagctgctgaagtgctcggcgtcttcgatgtcgatggtcacgtcggtgccgtattcgatcacgcccagggtagtggcgcgggacttgaacacgttggcgctgtggtgaaagcgcaggcgctccggcgtattggtggccaggcgatggggcccgcaaatgcccgacatccagctgcgggcgccttccaggtcgaagcgttgaatcgtttggctgctcatcagggtgcacccacggcggttaggctgttgcgcgctctggcggcgcgtcgttgttgttcgacagcaaataatgcgccacgccggcgcaatggccagcgggtggatagcaatagtcgactaagtggataaaccaccggtttttccggccattgccctgcaagacagtagcgcatcccgtcaccttcctgcaccgggttgggtatttgctgcccaattatccggcgcaggttcccccactaagcggatagcccgcaccctgcaccactgcctctaataaaccaccgattagcccctatcaaaaaggtgcctcccatgagtggtgcaagaagcgtcgagcagtggaaaacgtttatcgaaggttgcctggactttcgcccggtggatgaagtgtttcgcatcgcccgcgacatgttcaccgagccggaactgttcgatctggagatggaactgatcttcgaaaagaactggatctacgcctgccacgaaagcgaactggccaacaaccacgacttcgtgacgatgcgcgccgggcgccagccgatgatcatcactcgcgatggcgaaggccgcctcaatgcgctgatcaacgcctgccagcaccgcggcaccacgctgacgcgggtcggcaagggcaaccaatccacgttcacctgcccgtttcatgcctggtgctacaagagcgatggccggctggtgaaggtcaaggcaccgggggaatacccggagggtttcgacaaagccacacgcggcctgaaaaaggcacgcatcgagagctacaagggctttgtgtttatcagcctggacgtaaatggcagcgacagcctggaggatttcctcggcgacgccaaagtgttcttcgacatgatggtcgcgcagtccgccaccggtgagctggaagtgctgccgggcaaatccgcctacacctacgacggcaactggaagctgcagaacgaaaacggcctggacggttatcacgtcagcaccgtgcactacaactacgtggccacggtgcagcaccggcaacaggtgaacaccgagaacggcaccggcgccggcagcaccctggactacagcaagctcggcgccggcgacgccaataccgatgacggctggttcgccttcaacaatggccacagtgtgctgttcagcgacatgcccaaccccagcgtgcgctccggctacgccaccatcatgccgcgtctggtgcaggagcacggccagcaaaaggccgagtggatgatgcatcgcctgcgcaacctgaatatctacccgagcctgttcttcctcgaccagatcagctcgcagctgcgcatcatccgcccggtggcgtggaacaagaccgagatcatcagccagtgcctgggggtgaagggcgagtccgacgccgaccgcgaaaaccgcattcgccagttcgaggacttcttcaacgtgtcgggcatgggcacgccggatgacctggtggagttccgcgaagcccagcgcgggttccagggccgcctggagcgctggagcgatatctcccgtggcagccaccgctgggcaaccggccccacgcccaacagcgaagccatcggcattcaaccggccatgaccggcaccgagttcacccatgaaggcctctacgtgaaccagcaccgcaactggcagcagttcttgctcaacggcctcgatcaacaagcgctgaaactgcgggaggtgaactgatgaatgccccattgcagtaccggatcgagcagttcttctaccgtaaatccgagctgtgcgacgcccaggactgggacgcctatgtgcagctgttcgacccgcagagcgagttccacctgccgcaatgggactcggagcacgtctacacccgcgaccccaagcgcgagatgtcgctgatctactacgccaaccgctcgggcctggaagatcgcgtgttccgcctgcgcaccggcaaggcggcatcggccacaccgatgccgcgcacgctgcatttgatcaacaacgtgcgcatcgccgaacaggcagatggcacgctggaggtgaagttgaactggcacacgctgttctatcgcctggccacgtcagagcagttttacggccacgccacctacaccctgaaacctgaaggcgacagctggttgatcacccgcaagcatgcgttgctgctcaacgacaccatcaactcggtgctggatttctatcacctttgacagccgactgtgacttgtagtgagcgggcttgccccgcgctgggctgcgcagcggccccaaaagcttgggagcgctgcgcactccagcgcgggg

SEQ ID NO: 53 - DNA, 24750 bp, Pseudomonas nodulensis
tgggctgcgcagcggccccaaaagcttgggagcgctgcgcactccagcgcggggcaagcccgctcactacagttataaaatccatggagaacggtggatgaatcacaaagtagccttcagttttgccgacggcaagaccctgttcttccccgtcggagccaatgaaatcctgctggatgccgcgttgcgcaacggcatcaagatcccgctggattgccgcgaaggcgtgtgcggcacctgccagggccgttgcgagtccggcgactacagccaggattatgtcgacgaagaagcgctgtccagcctcgacctgcaacagcgcaagatgctcagttgtcagacgcgggtgaagtccgacgcgacattctatttcgactttgattcgagcttgtgcaatgcgccggggccggttcaggtcaagggcaccgtgagcgcggtggagcaagtgtcggccagcacggcgatcctgcaggtgcagttggagcaggcgctggactttttgcccggccaatatgcacgcttggcggtgcccggcacagacagttggcgctcgtactccttcgccaacctgccaggcaatcaactgcaattcctggtgcgcctgctgcccgatggggtgatgagcaactacctgcgcgagcgctgccaggtcggcgatgaactggtgatggaagcgccactcggcgccttctacctgcgccatgtcaccaaacccttggtgctggtggcgggcggcaccggattatcagccctgctgggcatgctcgatgaactggccgtcaacggctgcgaccagcccgtgcacctgtactacggcgtgcgtggcgcagaagacttgtgtgaagcggcgcgcatccaggcctacgccgcgaaaatcccgggctttcgctacaccgaagtgctcagcgcgccctcggacgaatggcccggcaaacgcggctacctcaccgcgcatttcgacctggccgaattgcgggacagatcggcggatatgtacctgtgcggcccccctccaatggtcgaatccgtccaacaatggctggcggatcaggcacttgatggcgttcagttgtattacgaaaagttcacgcagagtaatatctgaccctcagcacttctgaggggtagatgcggcgtgcactccaccctgagaaaaacaagtagaagggaatgttaatggcggatgacatggttaacccggtgggcctcaagcgtggcctgaagaaccggcacattcagctgatcgccttgggaggggcgatcggcacggggttgttcctcggctcggccggggtactcaagtcggcggggccgtcgatgatcctcggctacgcgattgccggttttatcgcgttcctgatcatgcgccagctcggcgagatgatcgtcgaagagccggtggccggttccttcagccattttgcgcataaatactggggcggctacgcaggcttcctggccggctggaactactgggtactctacgtactggtgggcatggccgaactgacggcggtgggcaagtacatccagttctggtggccggagatcccgacctgggtcagcgcgctggtgttcttcgtggcggtgaacctgatcaacaccctcaacgtgaagttcttcggtgaagccgagttctggttcgcgatcatcaaggtggtggcgattgtcggcatgatcgtgctcggctgctacctgctgttcagcggcaccggcggcccgcaagccacggtcagcaacctgtggagccacggcgggttcttccccaatggcggcatggggctgttgatgtccatggcgttcatcatgttctcgttcggtggcctggaactggtgggcatcactgccgccgaagccagcgagccgcgcaaagtgatcccgaaagcgatcaaccaggtggtgtaccgcatcctgattttctacgtcggcgcgctgaccgtgctgttgtcgctctacccatgggaccaactgctgcagacccttggcgcgtcgggcgacgcctacagcggcagcccattcgtgcagatcttctcgctgatcggtaacgacaccgccgcccacatcctcaacttcgtggtgctgaccgcggcgctgtcggtgtacaacagcggcgtgtactgcaacagccgcatgctgttcggcctggccgagcaaggcgacgcacccaaatcgctgatgaagttgaacaagcaaggcgtgccgatccgcgccctggcgatttcggccctggtgacgatgttgtgcgtggtggtcaactacgtcgcaccgaagagcgcactggagctgctgtttgcgctggtggttgcctcgctgatgatcaactgggcgctgatcagcatcacccacatcaagttccgcaaggccatgggcgaacaaggcctgacgccgtcgttcaagaccttctggttcccgttcagcaactacctgtgcctggcgttcatggtgatgatcatcagcgtgatgctggcgattccgggcatcagcgagtcggtgtatgcgatgccggtgtgggtggggattatctacattgcctatcggctgcgggttcgcaggagccacgcggtagtcaacgcgcagtaatgcctgtgggagggggcttgccccctcccacattttgtttacagcgtggagcgtactcgccacaactcggggaacagcacggtgtcgagcatcttgcgcaaataccccacaccctccgtgccacccgtgcccggctggaagccgatgatccgctctaccgtcgtcacatggcggaagcgccactggcggaacgaatcctccaggtcgataaacttctcggccaattgatacaggtcccaataacggttcgggtcgcgatacacctcgcgccacgccgcctccaccgactcatcgtgaaccgtcgccgccgtcgggtcgcgctcggcacgtttcggatcaatcgccaggcccgccttgatcatcaggttgatcgcctcgtcatacagcgacggcgtggcaatcgccactttcaactcgttcaacagctccggccggtgggcatggggccgcaacaacgccgcgcttttattgccgaggataaattcgatctcacggtactggaacgactggaaccccgacgactggcccaggaacgggcggatcgccttgtactctgacggcgtcatcgtggccagcaccgcccaggcgtgcaccagttgatcgaagatccgcgacacccgcgccagcatcttgaacgccggtggcagctcgcccaggcgcacgtgttcacgggcggccttgagctcgtggagcatcagtttcatccacagctcggaggtctggtgctggatgatgaagagcatttcgttgtggtccggcgacagcgggtgctgggcgctgaggactttgcccaggtccaggtaatcgccgtagctcatggactcggaaaaattcagttcggcgttatgccattcttccggaggttggtaatcggcagagaagggacattggctcatcgcgtgggctccttgagcgggcggagaatggcgcggacagggctcgcgtcgaggttggcaaaacgcagcggcagggcgatcaattcatagtcgccctcggggacgtcatcgagcacgatgccttcaagaatcgccatgccatggcgcgccacggcgttgtgggaatccatggtcttggactgctgtgggtccagggatggcgtgtcgataccgatcaagcgcactcccaggctggcgagcaactcgatggtctgtggggcgatggcggtgaagttcgaatcccattcggtaagcggcgcttgtggataagtacgcagcaacacacgctcgggcacgttatccacacggccctccaactgatgcggctgcaccagcgcgccgctgtccaggcaatgcagcacgcggcacggccccatatacacatccaacgacacctcaccaatggccgcgccgtccgcgctgtaatgcagcggcgcatccacatgggcgccggtgtgcggcgacaaggtgatgcgcccgacattcaccggacattccgggccaaactgccatacgcgctcttcctggaacggcgtatcccccggccaggtcggggtcgccgtactcaagggcgggctgatatcccaccacgtttttattgggttcatttgcaggctctcggcggttactggggtgaatgatacgagggccggccgcgaattttcttgcgaattctggcgtgaagggggaaatctttcgcacttattgcgaggaaatagcggattggtgatgggttatatcaaataaacaccgctgcgcttctgggcatcccgatgtcgagttcagaccactgacgcaacgccccaggccttagtgtggatccttccattccctgcctcggaggcatcatgtccaagcccatcaccgtactgcgcgacacccaccccctgccggtcctggacgcctgcaaatgggaaaagctcgaaggcgacccgcacaccgtcaacctcaacgcctacaccagcgaagacggcagcaagatcatgggcacctggatctgcacaccgggcaagtggtacgtggattacgtgaagtgggaatactgccatttccaggaaggctactgcatcatcacgccagaaggcatggagccgattcacttgcgcgctggggatatctttgtggtggaaccagggatgaaggggacgtgggaagtggtcgagacggtgcgtaagtattttgtgtttgcttgaactggcaatccgctgatttcaagaacagaaaaccgcctgtaacggcggttttttgtgcgtttcagcggctcttgccagccaaggggcctgtcggctccatgtctttaccatgctcaatagctacgctgaaaaaccttttttgattggcagacgttgggccgccaagcttcttggcttcggcgcaaaacgtctcgacccattgcgtgtctgatttctggtttgtcgctttcattaacccaagcctctgtgagccttgtacatgcgcccaatactaggtgcgctcaactgaaatcacaaggcggtgcttttcgtcataggtgaagccaagtcgcttatacgtctgtacgacgtctggtcgtggctcctgaatttcgattcgagagcacccgatgacacgcgcgtatgcgtcgatggcgccgagggcaagcgcagcgatcaagcctttcaagggatgttcgctatctgagttaccttcgagaagcacaatcttgatcgtgactttactgtcacgaggcgttgcgtaacagaggccacatagttgctcatcgtgccagatcgacaaatcaaaccctttagcgtccaaggccctccaggccggaacatcctcccagggaaattgggcgtcacctccccagaggtaaaacgcctctatggcccgaccatcaatcacatcgaagcgtactttcgcagcgtcgagccactgatggcccaatgcattccactgctcgatgaatgaagccagtgccgcctttctcgattgagattgaaagaccaggtacttgagggagttcgagtatcgacgtgccattacgatcagattcttacgagtagagtggaaagatcagaaagccgcgttaacaacgaaagggcgcaaaccgtagcaagatcgggtgtagccttgggccaacgatgaattcaagatttttcaggcgtattcgtcacgagcaatggagccctccccatgacggctgaattcgacaggcaaaaaatcgtcatcttcaccggctctggcatcagtgccgaaagtggcctggacacgttcaacgacgaaaccggactgtggatggaccatcgcgtcgaagacgtcgctacgcccgaggcatggcatagacaccccgcggacgtgctcgcgttctataacgcgttgcggcacaaggcgtgggctgcgcagcccaatgcggcgcaccgcgccctagcggagttggagcagcagtttgatgtagtggtgattacgcaaaacgtcgacgacctgcacgaacgggcagggtccacgtgtgttctgcatctgcatggtcaaatcaacctggcgcaaagtacggtcgacgagcaactgatttacaagatcgacgataagccgatcttgctcggcgacacctgtgaaaaaggcagccaattacgcccgtatatcgtctggtatggcgaaaatgtgccaaatatcgagaaggcgctgcagcactttaaaaacgcagagaaagtgctggccgtgggcacatcactgaccactcaaccggccgcaggcttggttacgaaagccaggcactctgccgaaaaggtcctgattggactggctgtttcgcgtaagccctacggctacgaattcatgcgaggaaaggcatcaagcctggtgccttatgtggtgggatgctggctgaaaggccaaaaggctcgttaaccgcaaaaacccgggggcccactgaaggcaggctcccggaaacgcccctacttgggcttgcgatagctgttgatgatcgccgaaaagtccttgcccccttccccgcgctggctcatcgattgatacaactgttgggccacggcgcccaggatcacgggttgcttcgcctgacgtgccgcttcggtagccaggcccaaatccttgagcatcaggtccgcaccaaacccaccggtgtagccacgcgacgacggcgccgtttcgatcacgcccggccatgggttgtaggtgtcggaactccagcaacgcccggtcgagctgttgatgatccccgccaacacctgagtatcgatgcccaacgcgtcgcccaatgccatggcttcgctgacgccgaccatgctgatccccaacaacaggttgttgcagatcttggcgatttgcccggtacccacctcaccgcagtgcacgatgttgcggcccatctgcgccagcaccggttgcagggtagcgaacagttccggggtggcgccgaccatgaaagtcagcgtcccagcagcggcgccaccggtgccgccggagactggggcgtcggctacggttacgccttgcctggccgccgcagccgctacgtcgcggatggtttgcgggtcgatggtgctgcaatccaccgccggtacgcctttgccgatgccggcgagtacaccgtcttcattcagccatacgctgcgcacatgggcggcggcgggcagcatggtgatcaccagctcagcgtctttcgccgcatcgcgtggtgaatcgctgatggtgccgcccaactcggccaattccttgagtaccacctggttcaagtcgaacaggttcagcgcgtgacctgccttgatcaggtttcgggccatgggggcccccatgttgcccaagccgataaatgcaatcttcatggttgtctcccggaatcagcgcaggttgatggtggtgttgacgccatcgttgaccgtgtcgtcatcgaaccagcggctggtgacggtcttggtctgggtgtagaactgcaccacttgcttaccgtacgggccgaggtcgccgagcttggagccccgggagccggtgaagctgaagaacggcaccggcaccggaatcgggatgttgatgccgacctggcctacatcgatttcgctctggaatttacgcgccgccgcgccgctctgggtgaacaggccagtgccgttgccgaacgggttggcgttgaccagggcgatggcttggtcgagggtgtcgacttccagcaccaccagcaccgggccgaagatttcctcggtgtagatacgcatatcagtggtcacgcccgagaacagggttgggccgacaaagttgccttgctcgaagcccggcaccttgatgtcgcggccgtccagctccagcttggcgccttctttcacgccgctttcgatcaactccaggatgcgtgccttggcgcgcctggaaatcaccgggccgacatcggtgccggcctcgctgcccgcgttgaccttgagtttctgcgccagcgccttcagatccggcagccattgcttggacgcacccaccagcaccaccaccgaggtagccatgcaacgctgacccgccgcgccgaaaccggcaccgaccagggcattgagggtgtgctcacggttggcatccggcagcaccaccgcatggttcttggcgcccatcatcgactgcacgcgcttgccatgtttgccagccaggtcgtacacatgggtgcccactgccgtcgaaccgacgaaggacacggccttgatgtccttgtgggtgcacagcgcatccacgacatccttgccaccgtgcaccacgttgagcacgccagccggcacaccggcttccagcgccagctccaccagcagcatggtcgacagcgggtcctgctcggacggcttgagcacgaaggtgttaccgcaggcaatagccatcgggaacatccacagcggaatcatcgccgggaagttgaacggggtaatgccggcgcacacgccgatgggttggcgcagggtgtaggtgtcgacaccaccggcgacattctcggcgaattcgcccatttgcagggtgccgatggaacacgcgtgctccaccacttccaggccacggaaaatatcgccttcggcatcggcaatggtcttgccctgctcgttgctgagtaccacggcaatgcgcttggaatgttcgcggatcaaggcctgcagcttgagcatgatgcgcatgcgcgcgccgatcggcgtcagcttccaggtctggaaggcgcggtgggcggcgtcgatggcggcgttgacttcatcggcggtggcgaacgggactttggccagcacctcttgggtggcggggttgacgatgtcttgccactcggtggtcttggactcgacccactcgccgttgatcagcaacttgacctgttgcacggaaatatcggcagatgcgttcatgtggtctccaattcttatttatatgcagagaaccaaggccaggggtgtgctctcaatagctgacggtcgcgcccgcgtcccagcttaaatcgggttcagcctcaaatatcttcattcgggacttggccctgcgggttggagctgtgatcacaccagtccgcgttgcgggactcgaagaggcaaaggcatcctcttcgtcccgcgccttgactgatgcgatcacaactccaacgcgatccgccatctattgagagcacacccctatcgccttgaagaatgaggcgttcggactgtttttggagtatagatgtgcaaatctctaataagaacgcacataaaagccggaccaatatgcaaaaaaacatcacgtcgctgggctccctgaactgggatgacctgaagtttttcctcgaagtggcccgcacccgcaaggccagcgtggccgccaagcgcctggcggtggactacaccaccgtgtcgcggcgcatcagttcactggaagtgtccctcggcaccctgctgttcgaaaaatcccggaccaacggcttcgtcctcaccagcgaaggccagcgtttgctgggctacgccgagtccatcgaaagcaccctgcacatggcctgcgaacaagtctccggctccggcgtggcgctgtccgggcacgtacgcatgggttgcaccgaagggttcggcagcttcttcgtcaccccgcaactgagccacttcgtcgacacctacccggccatctcggtggacatcctgcccctgccccacttcatcagcctgtccaagcgcgaagccgacatcgtcatcgccctggagcgcccggaacacgggccgtatgtgtgctgcaaactgtgcgactacaagttgcagttgtacgcgacccaggaatacctggaccaacatccgcccatccgcaaaccttcggatttggccgagcatccgtttatcagctatgtggatgatctggcgttcagctcggagttgctgtacctggcaaacgtagtgcccggggccagtgccagtttgcgcagcaccagtgtgatcgcgcagtacgtcgcggcgcagcaagggcggtcgatggcgatattgccgtgctttctggcggcgcaggatccacggttgttaccggtgctgggggagcagatttccatcactcgccagttctggatgtattgccgggaggatctgaggaagttgaagcggattacgttgttgtgggactacatcagggaggtgacggagcagaatcaggggctgttgatgggggagacgcgggagatgcggtttgaaagggaccaagcaatagagaaacactgatcattcaaatttcgcgccacccgccaaaccatggcaattcgcctccatagctgataaaaagcagattactaaggaggaaaactgtgaaaatcaccattaagaaagattacaaatctattcctgcaggagttgagtttgacatcccagacttttgtgttttgacaggaaaaaacggcagtggcaaaagtcatatcctcgaggctatcgcaaacccaacactctcagatgtaagcctaaatggagcgagtacaaacaagatattacatgtagggtttaatggcctaaacccacaagtagacgagcaatgcgactcaacccaagtactgcaaaacgttaacaactggtggaaccagatacttggaattatcacacactacaaacagatttcacaaaacggccaaagattcaacaatatatttactgaatacttaccccagcacggccccaaccctgtcttatactcaataataaaacaaataatggaaaagtcaggaaaaaacctagaaaatctaaaccaggaggacgttctaaacaatattagcttcgtcgaaaccagcaacaacaccttgtttttttcccaatgcgcgatgatctttaaggcatatcacactagacaggtaaagaatgagttctccgaattcagagccgcaaaacatagcggtactggaattcactttctcagccaaaaagatttcatatcaaaatatgggcctcctccatgggaactcatcaatgagatactagcccgagcaaaactaccctatgaagtgtcgaaccctgaacttgtagattacgacctcccttatcaacttagacttatcgacaaatctaacaacgtagatatttcggtcaacgacctttcatctggcgaaaaggttttaatgtcgttagcattagcaatttacaacacacaagaaggaggaactcgcccagacatcctgctactcgatgagccagatgcacccttgcacccccaattttctaaacttcttatagatatactcatcgagacaatagtgaggaaaactggcgtcaaggtaattatcacgacccactcgccctcaacagtcgcgatggctccagacaacagcgtgtttgaaatcaatagagacactaaagtcccattcatggttagcaactcccatgcagtcaatacattgaccgaaggaatagacttcctaaaagtatcattcgaaaagagacggcaaattttcgtagaaagtaaatatgacgtccaatattttgagcgccttttcaaccttgctcggcgtagatgtgatttttcataccatccaattttcttagagcctcatagtggatcatcgaactgcaccgatgtcatcagcatagttaacagactatactcaacaggaaacgatctcgtttggggaattattgacttcgataccaccaatacaccatcagacagaattgaagttcttggaaccggaaaaagatacgcagttgagaactatattttagatccactctatgtgtgtttaagcctaatccgatcagcaaaaaaaacatatgcagactttggagtaacaggaagcgttgcgacgtatacagaagcgatgaacctcaaagaagaagagtgccagacgatagtggacaacttcttaactcaaatcaatcttccgctagccgaacttactcccacccgactagataacaattacaccatcaactaccctaaatcttttctattacatcaaggacacagctacgagactctactaatgaatcgtttcccagaactgaagtcaatatctcgaggcaatggcgattcagcattgaagttaggagtgatgcagacagtcgaagagtaccctcagttccttcctagagagatcttcgaaaccttttccagagtcttaaatgattagtagctcaagcgttggtagcagacaagtgaagctgttaatacctaaagtcagatacctcaagaaaattccctttaaattgcaggatatttcctagagaatctccacagtattgcgtcataggatttgagtgtctagcctcctcgggtcgctgcaaacagcgactgggtttagcgacccgagaaacgtaggttcgacctcctcaactcatttggccggcgtttttgcctgccttatcgtgttatggcggctgtgcgcgggagaccttcggggtctaccgggttccctaggttaccggttcgctaacctgcgtacagctgccacctctccatgtttagcgacgtgccgtggcggtttctacttgttaacctaaggaaaaaccatgtccaagatcgtccccgatccaccgctttcctccctcaccaccctcggcgtcgtcaccttcggcgattacggcgaaaacgaaaaacccctgttccgcgtcaacgccggcatgcccattgaggaagcgttagagcacgcctccaccctgcttttctactccaagaaactcgcgatggaagccgccatggatgtacgcggcgagcaatacgcgtgggccgcgcattacctgtgtgagatgggcaaagccgtcgttgatgacctgacccaagccatgacgccaagccgttaagcgcacgcagctcaaatgtgggagggggcttgcccccgatggcggagtgtcagaaccccatgtactggctgacccgcagctatcgggggcaagccccctcccacattttgattgcatttcaggttgggactgggcgaaacctatcagtccgcaatcaccacaatcgacacccgccgattctccgtgcgccctgccgccgtatcgttggacgccaccggctcgctgctacccagcccgcgcagttgaatgttttcttccttcatacctacaccggtcaacaccgtcgccacgctttttgcgcggcgcagggacagttgctggttgtaggtttccttgccggacgcatcggtgtggccgtcgacgcgcacgcgttcgatgcccacgcccagcagggctttgccgatgcgttggacgatgtcggtgctgggttggttgagcgtctcgacgtcgctgccaaacagcactttgccggacaggccgaaggcccagccttcgtcggtcagttcaaagccttgctgcttgaggaccgcgacttgtgccggagtgaggcctttgggtggggcggtctggcaaccgccgagggcgagcagtgccatcagcagggtgataaacatgaagcgcgcggttgtgaacaaggggtcaactcctgtgttgaacgttgacgacggggttctccgactccgccgtttgctggccgcccgaggacaagcgcttggcctggtacatcgccgcgtcggcggcattgagcaaggtgccaggtgtggcgccatgatcggggtagatagcgatgccgatactgagggaggtcaatacctgcgtgttgccgggcacagggatgggcaggtccatgctggcgatgatcttgtcggcgatacgctgcgcgtcttccaccttgtgcaacggcgccagcaggatggcgaactcgtcaccgcccaggcgcgcgaccaggtcatcctcacgcagttgagcacgcacgcgctcggccaccgctacgagaacggcatcgccggcggcgtggccgaagctgtcgttgatctctttgaaacggtcgctgtcgaggtagagcaccgccagttgttccttggccttcgccgcactgcgcagcgcacggatcagacgcccttcgaagaaggcacggttgggcaggccggtgaggctgtcgtgattggcctggtgggcgagggattcgttttcgctttgcaggtggttttgccaggcttccatctcgccgagcaaggcattgaagtcgctgcccaggctgtccaactcggcgattcgcgccggcggcacgcggcggtcgaagtcgcgctcgctacgggcagcgtgggccacggcggcgaggctttgcagtgggccggtgataccgcgcaacaagcgtcgcgccaagtgcagagcgatccaagcactgagcgcggtgcagatgaggatcccggccaggccgctgagcaggaagcgcaagaggctaccgccgtgaccggtgaggtgagtgctgccgatggctcgcccttggtggaggatcggctggctaatgggttgttcaagcagggtgtgcgccagttccagttcaacccgcgagagcatgccggtatccggacgtatccactgcgccagcaacttgccattggcgtcgaagacttcggcctgggccacttcttcggtggaggcgatcaggctgagggcctcggtggccgccgcgctgtcgttgaacaccaccgccgcttccacggtgtagttgatggagcgggcgatcaggtgcaggttgtgttcggcatacacccgcaacgccagcacgcccagcagggtcagcgagatgctggccagggtcaccgccaccagtgccagcatcaggtgccctcggccgatgaccgagcgcaatgtcggtcgcacagtatcggccctcatggcgcaggcgctcggcgacgggacaactgcagcacactggggtgaatacgcacgccgctgcgcgccacggagtcgaggttgacctcaaaggacacttgctcatcactcaccctaaggcagaacaggctacccacggtgcactggtcgccgccttcgctgatgctgagcaccgggtgaccgatcaaggaggtgaacaactggctacgctcatcgacactgagcttgccgatgtacaccgcatcgcacgcgttgacgatatcgggatggttggccagcaggcgctgcaccaccaccggacgaccggtggcctgggtggtgcctttgatcaggtcgtcggtgtattgggtggggccgacgatgcacaggcgcaattgcgcaggctcgaccggccagcgcgcataactgaggataccgagtaccacttgggtgactgcctgggcgcgctgggcggcgaggtccgcaggggcgggcgcctgggcgaaggtgtgtggcgcgagcacacacagcaccgccaccagcagcaggcgtctccagctcaaactgcgctctgtgggcgagacagccacgttcatgcagcgattctctcaggtgttttttagatgatgccgcaacgatagcacagcggcgcaaaaccccgcgaagagtaggccttcgcgggggccgctatttttccagaaaaatcagtcgactgaatcagaaaaatgacatgacctgtcagtcagttttttccggttcgtggcctaattccagcatcaacccactcaagcgcttgaccttgcgcctgaccgcctcttcaaacacgccgcctcggggctcgatcaggctgaaccagcgcttggcccgcgtgatgccggtatagatcaattctttggtgagcaccgggttcaatgcatccggcaggatcaatgcggtgtgggtgaactcggagccctgggatttgtgcacggtcatggcgtacacggtttccacatcgttcagacggctaggcagcacaaatcgcacaccgccctgaccgtcgttgcgtgggaaggcaacgcgcagcacctgggggccgccgtcgctttcgggcaatttgagggcgatgccgatatcgccgttcatcaggcccaggccgtagtcgttgcgggtcatgagtaccgggcggccttcgtaccactgctcgtcgccttcgatcaaacgcaccttgcgcagggcggcagtgatgcgcaggttcaggccttccacgccccaagggcctttgcgtaccgcgcagagcagttggaatgcatcaaaggcgtgcagcagttgttgcgcccagtgggtccaggcgtcgctttcgcgcggggtatcaagtgacggacgggcgctttgcagcaggttcaggtaatagcgataaccgtgggcaccatcaccctgcccgtccagcaccaggcgctccagggcgtggtcgtgctcgcccttgaggctgatgcagaacaggtcactgtgactgcgcgccgccagcagcttgcgcgcctcttcggcattttgctggttgacccaacgcgccagttggccgatgccactgccctcgccgaaacgccgcgagtaacgcagcatcaccacttgttgggccaacgggtggctggcgtcgaggtcttcctgcaggccgctggcgctgaggtcttcgccgctgaccgattgcagccattggcgggtctcggcgctgtagaagccagcttcggcgtcgcggcacaagtcaccgagcacggcgcccgcctctaccgaagcgagttggtccttgtcacccagtagcaccaggcgtgcatggggcggcaaggcgtcgagcaggttggccatcatttccaggtcgatcatcgaggcttcgtccaccaccagcacatccaaaggcagcgggttaccgaggtggtggcggaagtgccgcgtgcccgggcggctgcccagcaggcggtggacggtggtgacctgggtcgggattttttccttcacgttgtccggcacattcagcgacagcacttgctggctgatggactcggtgaggcgtgcggcagccttaccggtgggcgcggccaggcgaatgcgcaacgggctgccagcctcaacggccggcgcttgcagcaacgcgagcaggcgcaccacggtggtggtcttgccggtgccggggccaccggtgacgatgctgaatgcaccgcgagtggccagggcgcaggcgagtttttgccagtcgatcacgccgtccggcggcgcctggtcgaacaaactgttcaagcgctgcggcaaatcggcggcgactttttcctgggtggcgaggcgcaggcgcaaggcgctatcgatgcgccgctcgtaggtccagtaacggcgcaggtacaggcgtttgccggacaggaccagtgggcgactctgggcggattcgctgccatcggccgccaacgcgaccaaatgactggcggccaaagcgtggcaccagtgggcgccgtccagcccctccagcaactgcgacggcagcagcatggcgccggtttgcaggtcaccttcaggcggcaacgacagggcgaagtcgggtgccttgagcgtttcgaacaggtcgaggcagacgtgaccatggcccaattgatggctggtcagcgcggcggccagcagcaccagcgggtcagtctgtgggtcgagttcgtgcaggaagccgacgaaggctttgtccaacgcacgcaaccaaccgcgatcgacccaacgctccagcaattgcaccaggtcggcggcgcggctgaggggcgtcagctcctcaagcggtaacggcgacaggctcataacagcactccttgttcccaggcgggctcaaccttgggcgggatgggcttgccctggaacagcaggtcgaggctttcgatgagctctcgtgggggccgggtgaaatacgccccctggctagcggattgagtgccgcgcaggaaaatgtacagcgcaccaccgacatggcggtcgtagtcgtagtccggcaggcgcgccttgagttggcggtgcagggccagcaggtaaaggacgtattgcaggtcgtaccgatgctcaaggatcgactgttccatggcgtccggtgtgtaggcggaatcgtcggggccgagccaattggatttgtaatcggccacgtaatagcggccgccgtgctcgaaagtcaaatcgataaagcccttgaacataccgttgagcaacaccggttcggcggcaacgcgggagacgccgttgtgggtgtattggcatacaagcttgtcgagggcgagtacgtcgactttgtggctggcgaaccagaactccatctcgatctggtactgctgcaacccgctgagggaaacgtgaccgttttccaccggcaatggcgtttgcagcaggtggccgagccagctgctgagggtgatgatccagccttcccaattgcgccggttgcagcgagcgcccaccgccttttcgattgcctcgggcgtaacgttaaaaccgtcctccccggcccattccagcaggccgtgcagaaaggttcctgggttagggccgcgtgggaaacggtgaatatcgccgccggacgccaccacttcgcggggtgcgtcggggtcgagacgctcgtcatcgaacagcttttgggcctgtgggctttccggtgcttcgagaggggcggcgctcatgctgtcgccgatgcgcaaggcgctgtaggaagcaatccaccagttttccgccgccttacgcttgggcaacaagggcgcccgcagtgtggcgacgttaagcggtggatggaaaaggacgtcttgcgcttcgggcaccagggcgtagttgattgcagtgcaaccttcttgaaggtccaggagccagcccgccaaaccggcggattcacccagcgatgcgccggcgccaagcaaatagcccagtgccgaaaggtgcagtacggagctattgctattgccgcgcttgaggtcggcgatgcccagccaacaggcatgtttagcgcgggtcagggcgacgtagaacagacgcaggtcttcggcgaggcgctcgttgtcggccttggcgatcaactcgggcgtcgggcgcaggctgacctgggatttgccgttttcatcatggtagtgaaggggtaagcggctgccatccacgggtttggctgagcaaatgaatggcaggaaaaccagatcgtattccaggcctttggacttgtggatagtcaccactttgaccagttgctcatcactttccaggcgcaggatctgttcctcgcctgcctggcccgaaagcgccaggtgttcggccagatggcggatcagcgcctgttcaccgtcaagctccgatgcggcctgttgcagcagttcgctgaggtggagcaggttggtcagcacacgttcgccatcactgcgcgcgatcagggtttgcggcagtttgaagtcatgcagcaagcgccgcagcatcggcagcacgccttgggtgcgccagattgcgcgatagccacggaactgcatgacgcggctttcccacgccagttcgtcctggttcagacgctccagttccggcaaagacaggttcagggtgacgcaggccaacgcggcacgcagcgggcgctccacgtccggttcggcgcaggccttgagccaggccagcaggtcgtgggcttcctgggcggcgaagaccgaatctttgtcggacaggtaaacactgcgcacacctcgggcagccagttcggcgcgcaccgcctgggcttccttgccgtcgcgcaccaggatggcaatgtttgacggcagcacgcctttgaagctcgcgtccggttgcaggaaaccggcagtgccttgttgcccaccgttgagcaattcaacaatgtgcgtggcacaggccgccgcaagttgctgacgatacagcacgttggaaatcggctgatcggtaggcaagtgccagaggttcaacgccggcaacgtgtgcccatcgacctgcaagtgttccttgcggccttgggacagcaccgaatggaacggcacggggttttcgccatccggctcgcggaacaggaacgcacctcggcccgtttccgcacgctggaacacatggttcaccgcctcgaccatcgcatggctggagcggaagttggtacccagggtgtgatggcggccggtggtggactggcgggcgcgcaggtaggtgtagatgtcggcgccacggaaggcgtagatcgcctgcttggggtcgccgatcaggaacaggccgctgtcgaggtggttttcttcgatgcggtagatgctgtcgaagatgctgtattgcaccgggtcggtgtcctggaattcgtcgatcaacgccaccgggaactgctcgcggatcacgctcgccagacgctcgcctccctcggattgcagggcagcattgaggcggatgagcatgtcgtcgaagcccatttcggcgcgtcgacgcttttcctcttcgaagcgtttgccgacccagccggcggcgtgttgcaggactgcggcatcgggcgtcggcagggcgtcgagggcggccttgaggctggccatcgcgtcgataccgggatgctgcggcggttcgcccttccaggcttcggccatgccgtcgggtgtcaggcgagtgaagccggtgccgatatcgagttgttcgagggtgtcgtcagcagcccaggcgctgatcttatcgaaccagggctcgaagtaacgggcttgcatcttgcgaccatcgacggctttggccgccacggcttgcaggcagatatcacgtagctcggcggcccattgctgccacggcgccttcagttgtaccagcgcttcacggcgttcttgcaggcaggcgttgatcagctcggcgggctcgcgggtctcatcggcgggccgttcgctgccgaacagcgcacgtacccgaggcatcaacgcggcgggcccgccccagttgttgcgcacccagttgagcgcatcgtcgtgcatcgggtagcagaacagccgccagtagtcgcgcagcacttcaccaagcaggtcgctgtggtcggtttccagggtctgggtgaacaggctgccactgtcgaaggcgtgctcgcgcagcatgcgctggcaccaactgtggatggtcgaaacggcggcttcgtccatccattgcgcagcgatgtccaggcggttgccgcaggcgggccattgttcgagcgggtattcatcgcgtagatcggcgatcagagcgtcgggctgttcaatttcttcgcggaagaagcgtgctgcttcagccaggcggatgcggatgcgttcgcgcagctctttggtggcagcatcggtgaaggtcactaccaggatttgcggcggcagcagttcgcggtcaaagcctgattcatcgccaccgtggccgaggaccaggcgcaggtagagggcggagatggtaaaggtcttgccggtgccggcgctggcttcaatcagctggctgccgttgagcgggaaggccagggccaagggtttgcgggtcatgcgccggcctcctcaccggtgagtgatcgccagggggcgttgagcagggggcgatacagggtttcgcaccatccttcgaattcttcgctggcgatgagtgtggcgtagtcggggaattgccgggtgagcgctggggtttcgcggcgctcgccttcgttattgagcccgtcaccttcataggctttactcgcagccgcttcggccttggctggatcggtttggccgagccacgcaaacgcggttttgacggcaaggggtagcggtttgctcatccctgtatgccaggccagcagtaggttgccgaggatttcctgggcatgggctcgatccagcggtggcagcagcaaggtgtcgtcgctggccaccaaggcggtgcttagcggcaggccgcaggcgcaggccactacgtgattgacccagggccgaatcaggcgatgccacttgcgggtcttgatcgaaccgatgctgttggggatggtggtgacgctcagcaacccgccatcactgcgtcgatgcagcccgctgatccagccttccaactgaatgccgcgatgctcaaaactgatcggctcggcgccggggtgcggggtgggccagagggccaataattgttggtagcgttgcagcaggccaggcaagggttcgatcagttcgttgcgcaggcactcgccgaaacccaccatcggcaacaggccactgccttgtaggcgcaaagcctgggcgttcagggcctggtcgaagtgatcgggctcggtgagtgctgcgctaagcagactgtcgctcaggctgtagcgttgcagtgcgtcgagcacgaagggttcttcgtcagccagcggtacttcggcggcctcgaagaacactttcagccgttggctgaagaagtgtttgaccgggttacgcaggaagtcctgaagctggccgaggttcaggggctcgtcctgttgatgaggtgccaggacgggttctgttgcggtggcatcggctgcctcgtggagcaactgccattcgcgggcatagctgaacagcacatcgccctcatggaagtagcgagcgctgaatggttgcagtgggtgctcttgagtcatggcatcgatcagcggctcgtcactgtcagcggagtgccagccactggccagatggtcacgcagttggccgatcaacaccgaggccgggcgatcactgttgtcgcgaatgctgcggccaacccagctgatatagagctggtcacgggctgaaagcagcgcttcgagcagcaggtagcggtcgtcttcgcggcgtgaacgatcaccggggcggtagtcactgcccatcaggtcgaagtccagcggtggttgagcgcgcgggtaatcgccgtcgttcataccgagcaggcacaccagcttgaagggaattgcacgcatgggcatcagtgtgcagaaattgacagccccggcgaggaagcgttgggacaggcgcccttgatccaaacccgccaaccaggcttcacggactacggtgaggggtaagtcatcgtacaggccaacggactcgcaggtttccagccacgtttctctgagttgttcgagttggcccaacaggtagtcgtcgtgttcgctactcggcaggaaaaacagttgcatcaagcgttgcaggcgttcaccccactccttggcgggagcgggttgcgacagggcttggtgcgcatcgttgagtgcgtcgagcaaggcgaccaacgggccgatcaggacagcgtcgagtccaccgatttcgtcgtaaggctcgataccggcgcacgctgcgccggtgcctacggcgtaaccgagtaacatgcggcgcaagccgaaacgccaactgttttgctccagctccgttggcaggccgaggccggcacgttgctcggcgttgagcccccagcggatgccggcgccttcgatccagcggtgcaacgtgggcaggtcgcgctccttgatggcaaagcgttcgcgcagtgctggaacgtcgagcaagtctagaatttcgctgacggggaagcggctgtcggggagtttcagcaggtgttcgacggcaatcagcagagggtcgcggccgcgttggccttggtcggtcagggtgaacgggatgaagcgtgggtcgttgcgctcaagctggccgaacacggcgcggatatgcggcgcgtagctgtcgacgtcggggaccatgacgatgatgtcccgggggcgcagcgtggggtcggcgctgaagcgttggagcagttggtcgtggaggatttctacttcgcgttgggcgctgtgggcgatgtggaagcggattgaggtatcgcgctccagatccacggcgggccatagctcgcgggtttcattgagtgggcgcagttcgaggatatcgtcctggagttgattgagcagtgttgtcggctcgctgtcgctgaacaggtcgatgcgaccgtcgcggaaagcggcgcggtagctgttggggtcgtcatagctgtccagcaagctgatgtagtcacgaccttgtttgccccacgcggccaataacggatgggcatgctggtgcagggtttgtgggtcgatggtgaccggcatgcccgctttacgcgcctgacgcttgtattcgttacgcagcaggtctttgtcggcgacgatgtcagaccaatggtgtcggcaagggttgtgcacacagagcaggacttggctgaagcgcgcgaggccggcgagggcttccagcgcctgggccggcaacgaggagatgccgaaaacgatgacgcgggatggcaggccctcgggcgctttttccagggtattgatgcgctcgataaagcgttggtgaacgcctgcgcgactttcggccatgccttcttcaccaacatccaatagcagcgcgcgccatagttcggcttgccagcagttggctgggttaaggggtttggattcacctcgaccgttacgcaactggtggcggccggcggcccagtcttccagccagtcggcgcggtagacctggtattggtcgaacaggtcagccaggcgctcggcgagttggtagcgtttacgcaggtcggtgtcgtgggtgaggaagcgctgcaacggttcgaagtgcggctgatcgataagctccgggagcaggcgcatcaggcgccaagtcagtggggctttatcgagcagggatttgggcgggatttcatctttgcccaagaccatgcggtagagctgccacataaagctgccgggcagttgaacatcgattgctgcggcgatgccgcaaccgcccatgtcgtcgtcttccggatcttcagccagggccagcttgagccactgggcgatgccattgctttgtaccagggcgatttcgttttccaagggtgccaaggggtagcggcgcatccaactgaccactaggctgcgaagctcgtccaggcggttgccgtgaaccaccatgaatccagcactaagggacgtcgcatccggcataacggcttccttgggaaaggcaaaatcgagggtgcgactttagcactgtggacagttgttggccgaattgggatgttagctgtcttttcgaccgcccaaaacaaaacccctgactgcgttagcagtcaggggttctggaatttaatcttgacgatgacctactctcacatggggaaaccccacactaccatcggcgatgcatcgtttcactactgag

SEQ ID NO: 54 - DNA, 341470 bp, Pseudomonas nodulensis
gaattctacagcgttacacgctgctgtcaacacctctttttctccgctttcgaccgagaggatcgaaacgttaatagagccagacaacactgctctaccaactccttctgggcttcgataaactgaagcaagtcgctgtcgaattctgcgtaactctttgtttaccaaggagtttttcgtttcgactgcgccggaagtggggcgaattatagacttccagaatctgccgtcaacccttaattacgcttttgttgcagaaagtggttttttcgcaataaggcgcgggattctccgcattacgggcggtatccgtagcaccaacagcaacgcacctatagaagtatagatagcccattccttgaggtccgctcgcacgatccacaacatatgcagcaaacccagcccaagaattacatacaccaagcgatgcagcttcttccaacgagtccccaaccgacgttgactgtaacgattcgacgtcaccgccaaaaccaacagggaaacaaaccccagcgccccgacaataatgtagggccgcttgcgcagctccaccccaagttgcgaccaatccagcccaagcacaaatacacaataagcagccagatgcagcacaacgtacgcaaagcaccacaaccccagttgccgacgcacggctatccaccccggccaaccgctgagcttctgcagcggcgtcattgccagggtaatcagtaacagaatcaacgtgccaagccctagccgatcgaccagtaccttgcctggatccggccccaggacagaacgccacgcttcatagagccaaaacagtggccaaatcgccgctgctataaagacgccaacgcgccagatcggataacgcatcagtagttcttccgcagatcgagaccggtataaagagaggccacctcatccgagtacccattgaacatctgcgtctcacgtacattaggactgaacagcccactcggcagacgacgctcccgcgcctgagtccaacgtgggtgatcgactgtagggttcacattcgcgtagaacccatactcgtcagcagcgatgctctgccacgtggttttcggctgctcactcaccagactgatccgcacaatggacttcacactcttgaagccgtacttccaaggcaccaccaggcgcagcggcgcaccattctgattgggcaactcacgcccatacatacccaccgccaggatcgccagaggattcatcgcctcatccagacgcaagccctccacataaggccaatcgatcaagccaaaactcgaacgctgccccggcatgcttttgggatcctggagggtttcaaaacggatatacttggccttcgaggtcggttcaacttgcttgagcagcgcggagatgggaaaaccgatccatggaataaccatcgaccatgcctcaacacagcgcagacggtagatccgctcttccaactgatagggcttcatgaagtcttccaaggcataacggcctggcttagcaacctcgccatcaataacaacgctccacggctcggtcttgagtgaaccggcattcgtggccgggtcacccttacctgtaccgaactcatagaagttgttgtagtgcgtagcgtctttgaaaggcgtgatcgcctcgtccttcaccgtgactgcctgccacttggtgcccggcagcttctcggcaaaccaactcggcgccctgcccgcttcaacatcggcatagcgcgacacctcgtcggcaccggccaaacgcggcaagctgctggctgcaatgccggcaagcgcaccgccgagcaagctgcggcgagagagatagaaggattcaggcgtgacatccgactcatggcaatcggacgctttgggtaatttgattaacatggcaactccgcagcattggaggactgatgcaccaatagactgcggagtatgggggaaattacattaaggcaatgttttgtcccggcgcagatgcagcaagtactgaaccggccccgaagcggcgtacaccaggaacgccagcaacaggatgcgcggcggatcactgaacaccacggcaaacaccagcacaactgccagaatcgctacgaaaggtacacgccccttcaagtcgagttccttgaagctgttgtacttgatgttgctgaccatcagcatgccggcagcggccaccatcaaggccaccagaaacgacatcttcgacccctggatgccgtaatcactgaaggcccagacaatacccgccaccacacccgcagcagcagggctggccagaccgatgaagtaacgcttgtcggcagtccccacctgggtattgaagcgcgccaggcgcaaggcagcaccggcaacatagatgaaggcaaccatccagccaaccttacccatatcacccagcgcccaggcaaacgccagcaatgcgggggcgacgccaaacgcaaccatgtccgacaacgagtcgtactcggcaccgaatgcgctctgggtattggtcatgcgcgccacacggccatcaaggccgtctagcaccatggccacgaagattgcgatggcagcaaaaccgaaatacttgctggcgctcgccgcatcacccgctgccagggcactctgtgcgctcatggagttgatgatggagtagaacccggcaaacaggttcgccgtggtaaacaggttgggcagcagatagatgccacgatgccggaccttgcgaccttccgcgtcatgcccttcctcaacatgttcatcgatcggcagcaggctttcggcgtcaggagcctggcttggctcttcgggacgttcgctcatggactttaccttgcaacggtgtgaaaaaagttcgacagaaacttgcggccagtgttcgcccgcaaacgatgcagctttataccagaacccgccgcccaaacgaaaaaacgcggcctaggccgcgttttcccttgatacgtacgacttagttcttggctttgtcgacgatcttgttggcaccgatccacggcatcatggagcgcagctgctcgccgatgacttcgataccgtgagcggcgttgttacgacgcttggcagtcatcgaagggtagccggtagcgccttcgctgatgaacattttggcgtattcgccgtcctgaatacgtttcagggcgttgcgcatggcctgacgggactcggcgttgatcacttccgggccagtcacgtactcgccgtattcggcgttgttggagatcgagtagttcatgttggcgataccgccttcgtacatgaggtcaacgatcagtttcagttcgtgcaggcactcgaagtaggccatttctggcgcgtagcccgcttcaaccagggtttcgaagccggcttttaccagttcgacggtgccgccgcacagtacggcttgttcgccgaacaggtcggtttcagtctcgtccttgaaggtggtttcgatgatgccggtacgaccgccaccgacgccagcagcgtaggacagtgctacgttcttggcgttgcccgatgcgtcctggtagatcgcgatcaggtcaggaataccgccgcctttgacgaactcggaacgtacagtgtgacccggcgcttttggcgcgatcatgatcacgtccaggtcagcgcgtggcacgacctggttgtagtggatcgcgaagccgtgggagaaggccagggtagcgcccttcttgatgttcggctcgatttcgttcttgtacagcgcggactggaactcgtccggggtcaggatcatgaccaggtcggcagcagcaacagcggaagcaacgtcagtcaccttcaggccgtgggcttcagccttggcaacagtggccgagcctttgcgcaggccaacggtcacgtcaacgccggaatctttcaggttgcacgcttgcgcgtgaccttgggaaccgtagccgatgatggcgactttcttgccctggatgatcgacaggtcacaatctttatcgtaataaactttcatgaggttcctctatatatccaggccgtaaggccattcgctaatttgggttagatgctgagtactttgtcgccacgggcaatgccggtgacaccactgcgtaccgtttccagaatcgaggccgtcccgatcgactggataaagctgtccagcttgtcgctcgtaccggtcagttgaacggtataaacgctggcgctcacatcgacgatctgcccgcgataaatgtcggtcgtgcgcttgatctcggcacgttgggcacccgtagccttgactttaaccagcatcagctcgcgctcgatgtgggcactctccgacaggtcgaccagcttgaccacttcgatcagcttgttgaggttcttggtgatctgctcgatcacctcatcatggcctacggtggtcaacgtcagacgcgacagggtcgggtcttcggtcggggccacagtcaggctttcgatgttgtagttgcgttgcgaaaacaggccgacaacacgagacagagcgccgggttcgttctccagaagcagggagataatgtgccgcatgattaagtacgctccgtcttgttcagccacatgtcgcgcatagagccgtctttgatctgcatcgggtagacgtgctcactggtatccacctgaatatcgatgaacaccaggcggtccttcatggcgaacgcctcttccatcttcggcttcagatctttcagatcggtgatgcgaatgccgacgtggccataggcttcaaccaattttacgaaatccggcagcgactccatgtaggagtgggagtgacggctgttgtagctcatgtcctgccattgacgaaccatgcccagcacgccgttgttcaggcagacaatcttcaccggaaggccgtactgcaggcacgtcgacagttcctggatgttcatctggatgctgccctcaccggtgacgcacgcaacgtcagtgtccgggaagctcagtttcacacccatggccgcaggaaaaccaaagcccatcgtgcccagcccaccggagttgatccagcggttaggtttgtcgaacttgtagtactgcgccgcaaacatctggtgctggcccacgtcggaggtcacaaaggcgtcgcccttggtcacttcgcacagggtctcgatcacggtttgtggcttgatgatgctgccgtcacccttgtcgtaagggaacaggccgcgatcaccgcgccattcgtcgatctgcttccaccagcttgcaacggattccttgttcggcgtctcaccgatgtccttgagcgcggcaaccatttcggtcaacacgctttcaacaggacctacgatcggcacatcggccttgatggtcttggagatggacgccgggtcgatgtcgatatggatgatcttggcattcgggcagaacttgctcgcgccattgatcacacggtcatcgaaccgcgcgcccacggccaggatcacgtcggcatggtgcatggtcaggttggcggtgtagctgccgtgcatgccgagcataccgacgaactgacggtccgtacccgggaaagcgccgaggcccatcagggtgttggtgaccggcaggttgagcagcttggccagttcggtcagcggtgcagaaccgccgcccaggatcacaccaccgcccgagtacagcactgggcgcttggccgccaacagcatttctgccgccttgcggatttgccccgaatgcccgcggaccgccgggctgtaggagcgcagcttggctttcttcgggaagatgtattcgaatttttcggccggattggtcatgtctttggggatatcgaccaccacaggacccgggcgaccggactgtgcgaggtagaaggcctttttcatgacttccgggatttccgaaggatgcttgatcatgaagctgtgtttcacgatcggccgggagataccgatcatgtcggtttcctggaatgcatcggtccccaccatggtgctgggcacctggccggaaatgaccaccatcgggatagagtccatatacgcagtcgcgatgccagtgatggcattggttgcgcctgggccggacgttaccagtaccacgccggctttaccggtggcacgggcataaccgtcagccatatgggtcgcggcctgttcgtggcgaaccaggatgtgggtaacagccggttccttgaacagtgcgtcgtaaacatgcagcagagcaccacctgggtacccgtagatatagtcgacgccttcgtcacgcaaaaagcggacgagcatctcaccgccagataaaagctccacgttgttcacctctaaaacgccagaataccgtccgttgaaaaccgacgggtcttaataggtttacttctcaacagagcatgagcgacggtggtcgccgactacgtcagcactgactgagcaagtattgggatcgtcccaagtgttgcgggcttttcccacccagcgcgaggtaacgcgttgcgggtgtaacaggtcggcgcggatgtgcgcctcatgatctgctgagcgggcctgcttctggcagtcccgatacagcggactttggattcttctgtttcaggcccttcaagtcaagcaataattgcgcttttttccaactaagcgcatgagaacgtagaagaaagggctttgaggagggataaaactcgcctgaatgtcgtcaagcggtagaaatgtgcgcaagactgccgaaaaaaccgacagtcaggcaattaacgagcgtcgacgatcagttggtcgaactttttcagcgcattacgtaagccaaggctttccagcgggcgatcggcgtagaccatctcggccatttccagaatgcccgacgcattgggcagcggcaggtcctgctcgaggatctgcttcatgcgcaccaggaatatccattgcagccactggtgaaagtccagcgtgtccaccgaaaagggttcgacgctgctgagcgcctcgacgctgggggacacctcgtcccaccagccctgcacacgcaactctcgttcgatcagcagcaactgttcggcaatggcgggaaaccgtgcatccatcagaggctgaccttggctttctggcgcgcctgggcggcaccggcggcgtcgccttgcgcggcacgcgcgtcaccaatcaaggcccacaggctggcttgcaggtctggacgaccgttggccagggtcaggccacgacgggcgaattgctcggcctgcggcgcgtcgccctgggccatgcgcacctgggccaggcgatatagcacttgcggttcacgcggcgcaacgcgctgggcacgttcgagactcgaagacgcaccgttcagatcaccacccgcctgctgttgctgggcagtggtcaacagggccagcaccggcccgtccaattgctcgtcagccgacaggccgccgccgctggaggacgagggaatgccactcggcgtcgatggcatgttgtaggtgccctgggtggccggggccgtctgaatcggcgtggtatcgatcggacctgagttgctcgggccaggggtccacggctcggcgctgattggtgccgatgtggccgcaccaccgccaggcaccatcaccaccacgcccgaatcctgcggcacagcttgcggcttggcctgggcgggacggttggtcacggtctggcggaacccgccattggccgagatccggtcgttattggacacggtcgtgctcgagtccaccacgggaatggagccgcgctgcacgctggcgcaaccattgagcaaagccagagctgtaatagctggaatccaccacttgttcacttgaaaccctctttgcttaattcatccagcccttgacccaatccatcaccgattccgcgtctgcaggggcactgccaccgcatgcggcgccgggtggcggttcgctgccgcgaatatacggcatctgtactgcgcccggacagttggcatcggagccctgcccggtgtgcggatcgatccaggcctgcacgatgttgtccggctgcggcatgttcaacggcagcggatcggccttgcgcatgaaactggtccagacctgcaacgcaccggtggcgccggtgaacggtgtcttgccgttgtcgtcacgccccatccacaccaccgccagcacatcctggccaaaacctgcgaaccaactgtcgcgcgaatcgttactggtgccggtcttgcccgccagtgtcaggttggacggcagcaccttgtagaccgaactaccggtaccctcacgcatcacacgctgcatggcgttctggatcaagtagatggagcctgcatcgaaacgctgctgaatctggaacggataacgcttgagcggctcgccttcagcggtcagcacgctgcggatcccgcgcatcggtgtattgaaaccaccgttggccagggtctggtacatcgtcgcgacttccattggggtcattgcgccagcacccagcaggatcgaagggaacgccgggaactcacgcgtaatgcccaggcgcccgagggtcttcaggacgtttggcactcccacttcgaggccgagacgcgaagtagagatattgtaggagtgcgccaacccctggtacaggaacacggtcccgtgggagcgacgatcaaagttctgtggcgtccacacctgcccgtccgcgcctttcactgacagcggatcgtcagacagccaactggtcagggtgtacttgctcggtttttccagagccgtgaggtagaccgccggtttgaccagcgaaccaatcggccgcaccgcatccagcgcacggttgaaaccggcgaagctggccaggcggctgccgaccagggcctggacctccccggtttccgggttggtcacgaccatggccgcttcgacttcatccgcgcccttacggcccgtcatacgcttgaacgtgtcattgaccgaggcttcggccttcatctgcaggatcgggtcgaaactggtgaagatccgcaggccttcctcggtcaagtcttcgtcgcggtagtcttcacgcaactggcgcttgaccaggtcgataaagcccgggaaagaactgtctgccagcttgccgcgggtagtgacacccaatggcattttcttcgcggcagcaacttgttcagcggtggcaacaccttgctgctctaaaacatccagcaccaggttacgacgctccagcgcacgctcggggttgcggcgcgggttgtagtaggaaggccccttgaccatacccaccagcaacgcaacctggtgcagcttcagttcggaaagcggttggccaaagaagaattggctggccagaccgaaaccatgcaccgcgcgctgaccgtcctggccgacgaatacttcgttgaggtacgcctcgaggatttcctgcttgctgtagtgcaactccagcagcatcgccatcatcgcttcggtgagtttgcgggtcaggctgcgttcgttggtcaggtagaagttcttgaccaattgttgcgtcagcgtactgccgccctgggtcatcttgccgccggacgtgttcacccagactgcacgggcgatcgatttcggcgagacgccccagtgatgatagaaatcacggtcttcaacggcgaccagggtttccagcaggtaaggtggtacctgatcgagcttgatcaggatgcgatcttcaaggttcttcgggtaaataccaccgatcatcaacggttcaaggcgaaccacaggcagcttcgagccgttgagagatgataactcggcgacgtaatcgccggagaaacgcacgcgcaccggctgggctttttccaggccttcatagaactggaagccgcgggtgttcaggtcgacggtatttccgctgacagccgctgcacccggaccgttgctcacgggctcacgacgatagcccaaggcgtcgagttcggtcaggaagtcatccttgctcagcttctggccggtgaacaattccagcgggcgcgcgtacaccttggccggaatggtccagcgcttgccggagaacttctcctgcaccacagcgtcgaggtagaccgcaaagccggcaagcaccacaaggcctaccaggccaagcttgagcgcccagccaagccaggggcgcaggccacgggaaggaggttttttacgggaacggggagatcgggttcgagtcatggcggcggattatacgcactttattgatgatcaacatgagccggacagcggtttgcacaagcggtcgcagcagccataatgcccgccatgtttttccccagactctgaaggatcgcccgtgagccagtccctgatcgctgccctgcaaaatccggctttatacccccatccggttgaagcgttccaagtcatcgagacccatatttcctgggtcgtactgaccggtccttacgcctataagctaaaaaaaccgatgaacttcggatttctggacttcaccgatctggaaaagcgtggccatttctgcaacgaagagctgcgcctcaatcagcgcctgaccgaagatttgtatcttgaagtgttgccgatcaccggcacagccgaagccccgcaattgggtggcgatgggccggttatcgaatacgcactgaaaatgcgccagttcccgcaaagccagttgctcagcaccctgcaagccaatggcgaactgaccagcgcgcacatcgatgaaatggccaagcagatcgcgcacttccatctctctgcaccaaaagtgccacagcagcacccggccggcacgccggatgaggtaatggctccggttcgccagaacttcgaccagatccgcccattcctcagcgacaaggccgacctggcccagctggaagccttgcaagcctgggccgaaagcagcttcgagcgcctcaagccactgttttcccagcgcaagcaggacggcttcacccgcgaatgccacggtgatattcacctgggtaacgcaacgttgatcgacggccacgtggtgatcttcgactgcatcgagttcaacgagcccttccgcttcaccgatgtgtacgccgataccggcttcctggccatggacctggaagaccgtgggctcaagtccctggcacgtcgcttcatcagtcagtatctggagttgaccggtgactatcagggcctggaagtgttgaacttctataaagcctaccgcgccctggtccgcgccaagatcgcactgttcagcatgccgagcgaggccagcccggtgcagcgcgccacgaccctgcgccagtaccgcaactacgccaacctggcggaaagctacagcaccattccatcgcgtttcctggccattacccacggcgtttcggctgtcggtaaaagccatgtggccatgcgcctggtggaagcactgggtgcggtgcgcctgcgctcggacgtggagcgcaagcgcctgtttggcgagcaacaggtggaaaacacaccacaggccggtatctacgcggccgacgccagtgccgcgacctacgcacgcctgaacgaaatcgccgataccgtgctgcgtgccggctacccggtcgtgctggatgcgactttcctgaaacgtgaacaacgcgatgcggctgccaaagttgccgaagccacgggtgcgcctttcctgattctggattgcaacgccccacaagccgttattgccagctggttggcgcaacgtcaggcggacaaaaacgatccgtccgacgcaacactgactgttatcgaagaacagcaagcccatcgtgatccactcaccgccgaggagttgctcctcagcaagcgcgtcgagaccaatgaaagcgggaccctcgacgcactggtggcgcatattcgccagcgtctgccaggcctgtaagaaaaatttcttggtcgtgtcgcctacttggggcgcacgaccgagcaatagtggcactataatggcgtcataaatccaacgggagtcgccgtcatgagtcagcccaagcttcttgatactccgctttactcgctcctgcataaagacgatgtccgaggcttcaaccaggaacgcccaaaagacggtgtcatcgacatgcgcggtggtgacttccgcgggctggacttgcgcgaactgaacgcggcgggggtggactttaccgacgcctatttccgatctgccgatttgcgcgggctggacctgcgcaactgcccgctggagggcgccagcctggcccacgcgcagatttccggcacgtacttcccgccggaactgagcgctgacgagattctcatgtcggtcaatttcggcacacgcctgcgctatcgcactcgctgacccctcctgcttctgccccggtttcgcacaggcgtgccggggacttcccgcctgcctgacctcatcatgcttatacgtctttaggccgtttccgactaaagaactacgcttttcctactgagcgctacacttctgttcaggcttgcctggttacgatacccaccgcaccattcggccgtcgcaaggaggcttgatgaacgatgagctgcaacacctgaaaaaccttggcaagacgtcagcacagtggctgcatgcggtgggcatccatagtgcatccgacttgcgtcgcctaggtgcggtcgatgcctaccgggccgtgcggacgcgcgggtttcgtgcatcgaaagtgcttctgtatgccatcgaaggggcattgatggacgtgcattggaatgacattcctgccgaacgcaaggaagcgctgaaccgtcaacttgacgctatttcaacgcgccaaaagaattagatcgactatcaggccccatgtttacagacattccgaacgcgcgtttgagaaaacccgcagacactgagaaaacaaaggttgactctcaaatgagaatcgttatgattatcacaactggtcgcgagatcagccgataattgaaagaccattggttcggactctcagattatctcctcatcaggctaatcacggttatttgacccggcttttgccgggtctttttttgcctatggaaaagccggattcagcgcgcaatgatcagaggatgtccgcgctcgggatgggcctgcacaagcacatccagaccaaacacagctttcaagggctcaggttgcatcacctgcgccggcgtatccaaggcatgcgggcgccccgcctccagcaacagaatacggtcacagtaacgggctgcgaggttcaagtcgtgaaggatcaccaacaccgccgccccacgatcggcgaaggtacgaatggcctgcaacgtagtgtgttgatgcaaagggtccagcattgacgtcggctcatccaacagcagcgtctgccccgcttcacccggccataattgcgccaacacccgcgccaagtgcacccgctggcgctcgccaccggacaacgccacatagctgcgaccgctcaagtgcccaacatcagccgcctgcaaggccgcctcgataatctcatcatcgcgcacgcgtccagtctggtggggcaagcgccccatgccgacaacctcttcaacacggaaagcaaagtccagtgtcgagctttgtggcaacaccgccaggcgctgcgctcgttgtgccccactccactcctgcaaaggacgttgatccaggcacaccttgccttggtccggatgcaactcgccgcacagcgcaccgagcagcgtactcttgcccgctccattgggacccagcacgccaagcacttcacccggcaacagatcaagcgtgacatccgccaacacgattttgcgaccacggcagatctgcaagttttctacacgcagcatcaggcacgcccccgcaacaacaggtaaagaaaaaacggcgcgccaataaacgcagtgacgataccgattggcaactcagccggcgccagggccagccgcgcaaccagatcggcaaacaacaacagactcgcacccgccaggaccgatgcaggcaacagcacccgatgatccggccccgccagcaaacgcaccagatgcggcaccaccaatcccacgaacccaatcatgcccgcagccgccaccgccgcgcccacacccaaggcggtgcagaagaccaattcacgcttgaggccctccacatcaataccgaggtgattggcttcagactcaccgagcagcaaggcattcagcgcgcgagccctgcgcggcaaccacagcgccacgcccgcgctcaccagcaacagcggccataaccgtgaatagctggcgccgttgagactgcccaggttccaaaaagtgagggtacgcaatgtcgcgtcgtcggccaggtaggtgaacagacccaccgctgaactggcgagagccgtaagggcaatacccgcgagcagcatggtcgcgacgttggtctggccgttgcgccgtcccagccgatagaccagcgccgtcacacccaagccccccaggaatgcgcagagtgacaacagatacggcccgaacgcatccggcaaaccgccgaaaaacgaaccgccgacaatcgccaccgccgcccccaaggcggcaccgctggaaacccccaccaggcccggatcagccagggggttgcgaaaaagcccctgcattgccacaccggacaaagccaacacaccgccgaccgccaaccccagcagcgtgcgcggcaaacggatctgccccaggatcagctcagcctgctccagcccttgcgcctcgatcggcaaccccatcaaacgcagcgcggccttgagcgtatccagcaaaggcaggctgaccggccccagtgccagcgaaagccagatcgccaagacacacaacagcaccagcccaataaacagcgtcttcggtttaaccaaagtcgtcatggggcaggcttggcttgggaggggtaaaacccggcagacaggtccgctagacttcgcggcaggcgtggcccgagtcctccaaccagcaaggtggggtcgacttcaaacactcgcccgctcttggccgccggcgtggacgccaggatcgggttttccttgaacagcgccgcacgcgccgcatcgccgctgagggcacggtcagcaaacaccagcacatccgggctcaagcccgccaatgactccaccgaaaacggcttgtaaccttcatgggtcgccagattgcgcccacccgcctgctgcaacatccagtcagccgccgtgtctttgcccgcaatcagcggcttgccgcccgcgtgcccgagcaacaacaacacgcctggcgccttttgcgtggactgggccttgctcacccagcgcttctgctgatccagtgcctgctcatatccggtaaacaattcgttggccttggcctcgctgcccagcaacttacccaggtgttgaagattgcctttcaatgtaggcagatccggttgcgccgagaacatctccacctgcacgcccgcgctgcgaatctgcgccagcactggcggtggccccatttcttcggtgccgaccagcacctgcgggcgcagactcagaatgccttccgccgacaactgccgctgatagccaatgctcggtaacgccttgagggattcaggatgctggctggtggtgtccaccccgaccaatttcgactcaccgcccagggccgccacccattccgacagtgccccaccggcactcacccaacgttgtggcagttcagaggcttgcgccccgtggttgaccagcagtccgacaacaagcgcaatagcgctggtactcaggcgcataacagggtttccttccaagggcagggccgctcaagcactcatcaatgtgacagcaaacgcccgtctggcatcgtattgagcgcccggtcagctgacgggcgaagccggcatttgataattgtttgcatttgaacgtcaaggcacttaaggattgcaatgaagtttctctgcccctccaccgcactcgcgcccaacagcagcctcggttttgacatcgacgggtgcaagctgctggccgtgcgccgcgacggtgttgcgtacttctacatcaaccgttgcccccatcgtggcattccactggaatggcaacccgaccagtttctcgatgacagcgccagcctgatccaatgcgcgacccacggcgccctattcctgatcgagaacggcgaatgcatcgccggcccttgcgccgggcaaagcctgaccgccttgcgcggctgcgaagacgcccagggtctgtgggtggaactctagtcgagcagcacgtccaggcgtcggtccacacagatgtcttcgcaggtcacccgcacgccatacgctagcacttctacccccgccgccttggcttcacgcaaggcggcggcgtaacccgcgtcgatttccaccgcaggtcgcacggcctcaatccccgagagattgacgcagtacaactgcaccgcacgcacaccctcccgcgccagatgcgccagctcgcgcaaatgcttggcgccacgctgggtcaccgcatcgggaaacgccgcaaccgcagagccgtcaaagcccagcgtcacgcttttgacttcgacgtaggccgcaccgtcgggataatccaggcgaaagtcgatgcggcttttctcctggccgtaaggcacttcgcgtttcaacgcggtaaagccgttgagctcagtgatcacccctgcatgcagcgcctcctcgaccagttgattggcgcgcgccgtgttcacacaggccaaccgcccttggggcgtctcggcgatttcccaagtgccgggcaatttgcgcttggggtcattggagcgactgaaccagacttgtccgccttccaccatgcaattgagcatcgagcccgtgttggggcaatgaatagtcagcaactcaccggtaacggtctcgatatcggtgagaaaacgcttatagcggcgaatcaggcgcgcttcttcaaggggaggattaaagcgcatcagccttgccagctccgcagaccacgggcaatccgctccactgcttcttgtagccgattgaggttttgcgtgtaggcaaaacgcacatgatgaccggcttggtagcgaccgaagtccaggccaggcgtgaacgccacatgctcggtttcaaggaaatgacggcagaatgcgaaggcatcaccgccaaacgcgctgatatcggcatacaaatagaacgccccttcaggctcgaccgcgatgccaaaccccagctcgcgcaaagcgggcaacaggaagtcccgacggcgaccgaactcagcacggcgctcttccagaatgctcagggtttgtggggtgaaacacgccagcgcggcgtgttgggccatgcttggcgcgctgatgtagaggttttgcgccagcttctccaactcgcccactgccgccggcggcgccaccagccaacccaggcgccagccggtcatgccgaaatacttggaaaaactattcagaacgaaagcctcgtcgtcgacttccagcacgctggccgcgtcggtgccgtaagtaaggccatggtaaatctcatccaccaccaaatggccattacgcgccttgatggccgcagaaaggctagccaattcgtcacggctgaggatcgtcccggtcgggttggctggcgaggccaccagcgcgcccacactgtcctggtcccagtgcttggccaccaggtcggcggtcaactgatagcgcacctccgggccgaccggcaccaactgggccgcgccctctaccaggcgcaggaagtgacgattgcacgggtaaccagggtctgcgagcagccaatgcttgccagggtccaccagcaagctgctggccagcaacaatgcgcctgaaccgccgggggtgatcaggatacgctcggggtcgacgttcaacccgtagcgctgctgatagaaaccgctgatggcctcgcgcagttcaggcaggccacgggccgcggtgtagcgagtcttgccgttggctaatgcggcctggccggcctggatgatcggctcggcagtggtgaagtccggctcgccgatttccaggtggatcacatcatggccggcagcctgcagctcattggcccgcgccagcaatgccatgacatgaaaaggttcgatggcgcgactgcgcgcactgtagggctgggccattagccttccttaacggtgaggacaaaatctggattctaccgaacccacgccgtaaaacatgttctattgcctgcccgacagcagatgcagtccgggcaagcgcctgcaaaacgactaaaatctacattcgaggcaacacatacccagcaatggcgggctgtcgcagtttgcaaccgctttgccgtgggcctcgacaaccgggagtggcgcaccccgaatctatctggtaagttcgcccgcttgcagccgcagggccggcaggtgtcggtgacgttgcaatcctgcgcaatggattagaagagtgagaggcggtctattcatgtccacccaagcaaagcaacagcagactcaaggcctcaacggcttcgaaccttacgtagagacgaaaggtgaggagtacatgggcgagcccatgcgcgagcacttcaccaagatcctgaacaagtggaaacaggacttgatgcaggaggtcgaccgtacggttgaccatatgaaggacgaagcagccaacttccctgaccccgccgaccgtgcgagccaggaagaagaattcgcccttgaactgcgcgcacgtgatcgcgagcgcaagttgatcaagaagatcgacaagacgctgcagctgatcaaggacgaagaatacggctggtgcgaatcctgcggcgtcgagattggtattcgtcgcctggaagcccgcccaactgcggacctctgcgtagactgcaagaccttggccgaaatcaaggaaaaacaagtcggcaagtaatccagccgagctgaacgaatggggcgtacgaacgccccatttttgtttctggcgtttaccgaatttccagtagtatccggcccatgacagcctctacctatatcgggcgttttgcccccacgcccagcggccatttgcatttcggctcactggtcgccgccctcgcctcctacctcgacgcccgcgccaaccaaggccgctggctcatgcgtatggaagacctcgacccacctcgtgaagagcccggcgcccaggcagcgatcctgcatgcactggaaagttatggctttgaatgggacggcgaactggtccgacaaagcgaacggcacgaagcctacgccaaagtgctgaacgatatgttcaaccacggcctggcctacgcctgcacctgctcacgaaaacaattggaagcctacaacgggatctacccaggcctatgccgcaatgccggtcacgatcagcaggacgcggccatccgtctgcgtgttcctgagcttgcctaccactttaccgaccgcgtccagggcgaattccgacagcatctgggccgcgatgtaggcgatttcatcatccgtcgccgcgatggcctctatgcctatcaattggccgtggtcctcgacgatgcgtggcaaggtgttaccgacatcgtgcgcggcgccgacctgctcgactccacgccacgccagctctacctgcaggaactgctgggcctgcgccagccgcgctacctgcatgtgccactgatcgtccagccggacggtaacaaattgggcaagtcctaccgctccccaccgttgacacccgaccaggccacgcctttgctattaagggccctgcgcgccctcggccagcaacccggggaagaactcgagtacgcccacccacgggaactgctggactggggcatccagcactgggacgccacgcggataccgcgcacactcacgctggccgaagcgcaattgagctgaaggcgcttgcagcttgccaagcatccgttaccatcgccgcacgtttttacacagaggccaatatgtacatctatcgattggtcctgctgctggtcgtcgggatctacctgttttcccccgccatcatggattggtggatcgacgccacgggcgcctggtatcgcccttatctgctgtggttgatcctgatcgtcgtgactttcatcctgcagagccaaaaagatgccgatgagctttagcctcacccagatgctgctgatcagcgccgcctacctggccgcgttgttcggggtggcctggatcagtgagcgcggaatgattccgcgggcgatcattcgccatccgttgacctacaccttgtccctcggcgtctacgccagcgcgtgggcgttctatggcaccgtaggcctggcctatcaatacggttacggctttctctccagctacctcggggtgtccggcgcgtttctgctggcgccggtgctgctgtacccgatcctgaagatcacccgcacttaccagctgtcatccctggccgacctgttcgccttccgctttcgcagcacctgggccggcgcgctgaccacgattttcatgctgatcggcgttttgccgttgctggccctgcaaatccaggcagtagcggactccatcagcatcctgacccgcgaaccggtgcaacatcgggtcgccctggccttctgcgcgctgatcaccctgttcacgattttcttcggctcacgccatatcgccacccgcgaaaaacacgaaggcctggtgttcgcgattgcctttgagtcggtgatcaagctgatcgccatcggcggcgttggcctgtacgcgctttacggggtgttcgacggcccgcaacagctggaactgtggctattgcagaaccagaccgccctcgccgccctgcatacgccattgcaggaaggcccctggcgcacactgctgctggtgttcttcgcttcggcgatcgtgatgccgcacatgtaccacatgaccttcaccgagaacctcaacccgcgctcactggtcagcgccagctggggtttgccgttgtttctgctgttgatgagcctggcggtgccgctgatcctgtgggcaggcttaaaactgggtgccaccaccaaccctgagtatttcaccctgggcatcggcattgccgcgaacagcccggccttggcgctactcgcttatgtgggcgggttgtcagctgccagcgggctgatcatcgtgaccaccctggccctctcgggcatggcgctcaaccacctggtattgccgctgtaccaaccgccggccgagggcaatatctatcgctggctgaaatggacgcggcgcgcgttgatcgtcgcgatcatcatggccggctatggtttctacctgctgctgggcgcgggccaggacctggccaacctggggatcgtcgcatttgtcgccaccttgcagttcctgccgggcgtgctgtcggtcctgtactggccgacggccaatcggcgcggcttcatcgccgggctgctggcgggcatcctggtgtgggtcgtgaccatgctgctgccgctggtcggcaacctgcagggcttctacatcccgttactgaacatgatctacgtgctggatgacaccagttggcacatggccgcgattgcgtcattggccgccaacgtcttgatgttcaccctgatctcgctgttcaccaacgccagcccggaagaaaccagcgccgccgaagcctgtgcggtggacaacgtgcgccgcccgcaacggcgtgagttgcatgcggcctcaccccaggagttcgccacgcaactggccaagccgttaggtgccaaagccgcacaaaaggaagtcgagcaggcgctgcgcgatctctacctgccgttcgatgagcgccgcccgtacgcgctacggcgtctgcgtgaccgtatcgaagccaacctgtccggtttgatggggccgagcgtgtcccaggacatggtggaaaccttcctgccctacaaggccggcggtgaaaactacgtgaccgaagacatccatttcatcgaaagccggctggaggactaccactcgcgcctcacaggcctggccgccgaactcgatgccttgcgccgctaccaccgccagaccctgcaggaattacccatgggcgtatgctccctggccaaggatcaagagatcctgatgtggaacaaggccatggaagaactcaccggcatcgcggcgcaacgtgtggtcggctcacgcctcaacaccctcggcgagccgtggaaagaactgttgcaaggtttcatcaatctgcccgacgagcatttgcacaaacaacacctggccctcgacggccagacccgctggctcaacctgcacaaagccgcgatcgacgagccgctggcccccggcaacagcggcctggtgttgctggtggaagacctgaccgaaacccagatgctcgaagacaagctggtgcactccgagcgcctggcgagcatcggccggttggcggcgggcgtggcccatgaaatcggcaatccgatcaccggtatcgcctgcctggcgcagaacctgcgggaagagcgtgaagaagatggcgaaatcaccgagatcagcgggcagattctcgaacagaccaaacgtgtctcgcgcatcgtgcagtcgctgatgagctttgcccatgccggcgcccaccagaaccacgacgaagccgtgtgcctggccgaggtggcacaggacgccattgggctgctggccttgaaccggcgcaatttcgaagtacagttcttcaatttatgcgaccccgaccattgggtcgacggcgactcccaacgcctcgcccaagtgctgatcaacctgctgtccaacgcccgtgacgccaccccggccggcggtgccgtacgcgtcaagaccgaggctttcgaacatacggtcgatctgatcgtcgaagatgaaggcagcggtattccacagaacatcatggaccgattgttcgaacccttcttcaccaccaaggacccaggtgaaggtaccggtctgggccttgcactggtctattccatcgttgaagagcattatggacaaatcaccatcgacagcccggctgacaccgaaagccaacgcggcacccgtattcgggtgaccttgccgcgtcatgtcgaagcgacgtccgctgtgaactgagaccgtcgagagaattgaatcaatgccgcacattttgatcgtcgaagacgaaaccattatccgctctgccttgcgtcgcctgcttgaacgaaatcagtaccaggtcagcgaagccggctcggtgcaggaagcccaagagcgtttcagcattcccacgttcgacctgattgtcagtgacctgcgcctgcctggcgcgcctggcacagagttgatcaagcttggccagggcactccggtgctgatcatgaccagctacgccagcctgcggtcggcggtggactccatgaagatgggcgcggtggactacatcgccaagcccttcgaccatgacgagatgctccaggcagtggcccgtatcctgcgtgaccgccagtcggccagcagcacgccggccgagcaacgcccggcgggcaaaaccaatgacaagccaggcgtcgacaacagcaacggcgagatcggcatcatcggttcctgcccacccatgcaggacctgtacagcaagatccgcaaagtcgcgcccaccgactccaatgtcttgattcagggcgagtccggcaccggtaaagaactggtggcccgtgccctgcacaacctgtccaagcgcgccaaggcgccgatgatctcggtgaactgcgcagcgatccctgaatccctgatcgagtccgaactgttcggccacgaaaaaggcgcgtttaccggcgccagcgccgggcgtgcgggcctggtggaagcggcggacggcggcacgctgttcctcgacgagatcggcgaactgcctttggaagcccaggcgcggttactgcgtgtactgcaagaaggcgagattcgccgcgtgggttcggtgcaatcgcagaaggtcgatgttcgactgatcgctgctacccaccgagacttgaagagcctggccaagatcggccagttccgtgaggacttgtattaccgcctgcacgtgatcgccctcaaattgccggccctgcgtgagcgtggcgccgacgtcaatgagatcgccaacgcgttcctgcagcgccagagcgcgcgcatcaaccgaaccgacctgaagttcgctccggacgccgagcaagcgattcgccactactcgtggccaggtaacgtgcgggagctggaaaatgcggtcgagcgagcggtgatcctgtcggagagcccggagatttccgccgagctgctgggcatcgacattgagctgagcgatctggaagacgatgacttcatcggcctggccccccaacagggcggcggtagcaacaccagccatgagccgacggaagatctgtcattggaagactacttccagcacttcgtccttgagcatcaggaccacatgaccgagaccgaactggcgcgcaagctgggcgtgagccgtaaatgcctgtgggaacgtcgccagcgcctgggcattccacggcgtaagaccggcgtgaccagcgagagttgagggggcgccctcacaggtaacacccgcagatgtgaaaaaactgttaccgcggatatttcgcgtaacaaaagccggggcttacggtaacgaagccccggctttttttggtccgtcaaaaacccgaaaccacctcaacccccaggttttgctgggcggtgcaaaagttggcacgcaccctgctatatgcttagtacaaaaacaataacaagctttgtacaagacaataaaaataagacgaatcgactcacgcataacaaaaacaacacggcggaggcgcagctaactgattcttttggagaggcgttgcatttggggcttgccccgcaaccaggccgagaacaacaaaaactgccctaaggcagagcctgaactggttggatcgtagatcagcaacacagcgaccaaagcaatccgtttgctcttgactcccgattgggagtgtcatgaaggtgaagcttcatggcgagggcgatcaacaaaaacaagaagcccgcaacccataataaaaatagagcacgcaactacttctgggggagcttcggctccccttgtagtttccgcgatttgaccgtccagcaacctcttgaagcttttggcttggggcttgcagcttgttcctacaccatcccctgactaaatgctagaatccccgcccatcatgcggtcattcttcgttatggccgaacattccttcaaacagtgcatcccatgctgaagaagttgttccagtcattccgttctcccttgcgtcgtacgcaacacaaacgcagcacgcctgaagtgctcaacagcagccagcattcgctgcaacgcgctcaattcagccgttatgcggtgaatatcgtcgaacgtttgcagaacgccggctaccaggcttatctggtgggcggttgtgtacgcgacatgctgctcaatatcacgcccaaggacttcgacgtcgccaccagcgccacgcctgagcaggtgcgtgccgaattccgcaatgcgcggatcatcggtcggcgtttcaagctggtgcatatccacttcggtcgcgaaatcatcgaagttgcaacgttccgcgccggccacccgcaaaacgatgaagaggaagacaccaaccagtcctcacgtaacgaaagcgggcgcatcctgcgcgacaacgtctatggcaccctggaagaagacgcgcagcgccgcgacttcaccatcaatgccttgtattacgacccggtcagcgagcgcattctcgactacgccaatggcgtacacgatattcgcaacaacctgatccgcctgatcggcgacccggtccagcgctaccaggaagacccggtgcgcatgctgcgagcagtgcgttttgccgccaagctcaacttcggcattgagcgccacaccgccgcgccgattcgcgaactggcaccgatgctgcgcgaaattccctcggcccgcctgttcgaagaagtgttgaagctgttcctctcgggctatgccgccgacaccttcgaaatgctcgtcgacctgcagttgttcgacccgctgttcccggccagcgccgaggcgttggaatacaacccgacgtacacccacaccttgatcagcgaagcgctgatcaataccgacctgcgcatcaagcagaacaaaccggtaaccccggcgttcctgtttgccgcgctgttgtggccggcgttgccaaaacgcgtactgcgcttgcaggagcgtgggatgccgccgatcccggccatgcaggaagccgcccatgagctgattgccgagcagtgccagcgcatcgccattccaaaacgcttcaccatgccgatccgtgagatctgggacatgcaggaacgcctgccacgccgcagcggcaaacgtgccgatctgttgctggacaacccgcgtttccgtgccggctacgacttcctgctgttgcgtgaaagcgccggcgagcagaccgacggcctgggcgaatggtggaccgactaccaggacgccaatgacagcgaacgccgcgacatgatccgtgacctcggcagcaaaggcgatggtgaaggcaccgggccgaaaaaacgtcgccgcagcagcagcaagcgcaagcgtagcgcggccgacgccccgggcgaataaacgtggagcgcatctacattggcatgggcagcaacctggctgccccggatcagcaattgcgcagcgctatcgaagcgctggcgcaattgcccgacacccacgtcgccggggtctctgccttctatcaaagtgactcactgctccctgggcagccgcgctacaccaatgcggtggcagccctggacagcaatcttgcgccgcttgatttgctggatgcgctgcaagccatcgagaacgaccagggccgcgaacgccttgagcgttggggcccacgcacgctcgacctggacatcctgctgtttggcgatcgactgatcgatgagccgcgcctcaaggtgccgcactaccagatgcacctcagggcgtttgtgctgtacccgttggccgaactggcgcccgccagcctggccttacccgatggtcaaaccctccacgacctgcttgaagcctgcccgtttgtcggtcttgaacgcctcaccgttgctgaatcgcgtcagtaacagcggtaacaccgtcatcgtaacaatgcggtaacacatccaattgacttcccgtgtcctcctcacgactataggcgtcccgctgccgccaacccggcgctgaagggcgcaatccaggccttataagcactgctctcaagacagtgcgcctgtataaacgaagactcacgcgcgttactcgctgtttccaagcgcctgaacgaggacccttttcatgccagacattaccctgaccaccttgcagagcctcaagctcaaaggtgaaaaaatcaccatgctgacctgctacgacgccacgttcgcccacgccagttgccaggccggggttgaagtgctgctggtgggcgactccctgggcatggttcttcaagggaatgacagcaccctgcccgtcaccaccgatgaacttgcgtaccacactgccagcgtcaagcgcggtaacgatggcgccttcatcatcgctgacctaccgttcatgggttacgcgacactcgaacagacctttcagaatgccggcaaactgatgcaagccggtgcgcacatgatcaaagtcgaaggcgcggtgtggcttgccgagtcgatccgcctgctcgcggagcgtggcgtgccggtgtgtgcgcacatgggcctgacgccgcagtcggtgaacatcctcggcggctacaaggtacagggccgcaatgaggcccaggcgcgccagatgcgcgcggacgccatcgcgctggaacaggccggcgcggccatgatcctgctcgaatgtgtgccgagcgagttggcggcagaaatcacccaggccgtgaaagtgccggtgatcggtatcggcgcgggttcggccaccgatggccaggtgctggtggtgcacgacatgctcggtctgtcgatcagcggccgcgtgccgaagttcgtgaagaacttcatggccggccagaccagcatccatgacgccttgagcgcttacgtcgccgaagtcaaaggcgtgaccttcccggccgccgaacatgggttctctgcatgaacaccgttaaaaccgtacgtgaactgcgggctgccgtgacgcatgcccgcagcgccggcaagcgcatcggctttgtgcccaccatgggcaacctgcacagcggtcatgccaccctggtgaccaaggccgcccagcaagcggatttcgtggtcgccagcatcttcgtcaacccactgcaatttggcgccggcgaagacttggacaaatacccgcgcaccctggccgccgatcaggaaaagctgctgcaggccggatgcaatctgttgttcgcacctaccgtcgaggaaatgtaccccggcggcatgaccggccagacccgtgtcagcgtgccgcaactgtccgaaggcctgtgcggcgccagccgtcccgggcatttcgaaggcgtggcgacggtggtcagcaagctgttcaacatggtgcagccggacatggcggtgtttggccagaaggactatcagcaactggccgtgatccgcgccatggtgcatgacctgaacatgccgatccagatcatcggcgagcccaccgtgcgcgccgacgacggcctcgcgttgtcgtcgcgcaacggctacctcaccgaagagcaacgcgccatcgcgccggtgctgtaccgcagcctcagccagatcggcgctgcgatcaagaccggtgaccatgacttcgccaagctgcgcgccgaacaggtccgccagatcgaagccgccgggttgcgtctggactacctcgaagtgcgccagggcgtgcatttgcgcccggcaacggcagaagatcgggatatcgtgatccttgtggcagcctacctgggggccacgcgcctcatcgataacctgcatctgaccctcgcctgaccgccctcaacgtgccctgcttgttgtgtaaatagaaagtgccggtataaaaaagtaccggcatgagcgcagacaaagccaagacatatcgacacgctaggtttaatgtaatcgccctgcgctatggttagcgctgtctggaacccattgctcgatcaaagactggatgttccaggcaaataagtgtcctaaaggcagtccccgtaataaaaggaaacccgcagcgatggcgtactaccgcacccctcatgacgttaccgctctgcccgcctggcaagcgctcaatcaacatcgccaagccatgcaggatttcagcatgcgcgaagcgttcaatgccgatcctcagcgtttttcccagttcaccctgagcagctgcggacttttcctcgattactcgaaaaacctgatcaccagcgaaacccgtgacctgctggtaaacctcgccaaagaggttcacctcaaggacgcgatcgacgcgctgtacaaaggcgagccggtcaattcttccgaaggccgcccggcgctgcacaccgccctgcgccgcccggtgggtgacaagctgtcggtcaacggcgtgaatatcatgccggacgtgcacaaggtgctgaaccagatcaccgacctggtcggccgcatccatgacggcctatggcgtggctacaccgagaagccgatcaccgacgtggtgaacatcggtatcggtggctcgttcctcggcccggagctggtctccgaggcgctgttgtcctacgcccataaaggcgtgcgctgccattacctggcgaacatcgacggcagcgagttccacgagctgaccatgaagctgcgcgctgaaaccacgctgttcatcgtctcgtcgaaatccttcaacaccctggaaaccctgaaaaacgcccaggccgcccgcgcctggtacctggcccagggtggctcggaagccgagctgtaccgccacttcatcgccgtgtcgagcaacaatgcggcggccgtggccttcggtatccgcgaagaaaacatcttcccgatgtgggattgggtcggcggtcgttactcgctgtggtcggccatcgggctgcccatcgccctggccatcggcatgtccaacttcaaggaactgctgtccggcgcctacaccatggaccagcatttccagaacgccccgttcgaacagaacatgccggtgctgctcggcctgctgggcgtgtggtacggcaacttctggggcgcgcagagccacgcgatcctgccgtacgaccactacctgcgtaacatcaccaaacacttgcaacagctggacatggaatccaacggcaagagcgtgcgccaggacggtacgcccgtcgccactgataccggcccggtgatctggggtggcgtgggttgcaacggccagcacgcttaccaccagttgctgcaccaggggacccaactgatcccggccgacttcatcgtgccgatcgtcagcttcaacccggtgtccgaccaccaccaatggctgtacgccaactgcctgtcccaaagccaggcactgatgctcggcaagacccgcaccgaagcggaagccgagctgcgcgacaaaggcatcccggaagacgaagtgcagaagctggcaccgcacaaggtgatcccgggcaaccgtccgagcaacaccctcgtggttgaacgcatcagcccgcgtcgcctgggcgccctggtggccatgtacgagcacaaagtgttcgtacagagcgtgatctggggtatcaacgccttcgaccaatggggtgtggaactgggcaaggagctgggcaagggcgtctacaaccgcctgaccggcgccgaagaaacctcggccgaggacgcttcgacccagggcctgatcaactacttccgcggtcgtcaccgcggctgatccaggtattgcaaggccaacgtccgtttggacgttggccttgaaccctccccctgctgggtgcatctttatgacttgtggctaaaacaagaataaggatcgctcatgttcgatatcagcacgttccccaccgccgatgccgtccgccgggctgcgcaactcagtcaagaggactatcagcgcctctaccgccaatccatcgatcagccggacaccttctgggctgaacaggccaaacgctttctcgactggataaccccctggcacactgttcaacgctcagacatccacaccggcgccgcccaatggtttgccggtggccagttgaacgtcagctacaactgcatcgaccgtcacctggcgcaacgcgccgatcagccggccttcatctgggaaggcgatgatccgacaaaatcttccaaaatcacctaccgccagttgcaccagaacgtcggccgcctggccaatgtgctgaaaagccgtggggtgaagaaaggcgaccgcgtgtgcatctacatgccgatgatcccggaggccgcctacgccatgctcgcttgcacgcggattggcgcggtgcactccgtggtatttggtggtttctcgccggatgccctgcgcgaccgtattctcgacgccgactgccgcacggtaatcaccgctgacgaaggcgtgcgcggcggcaagcccgttgcactgaagcagaatgtcgacaaggccctggccagttgcccgaatgtgggtacggtactggtagtggaacgcaccggagcgaccgttaactggagcgaaggccgcgacctcaagtatcaacaagccctggacgccgccagcgacgactgcccgcccgagccgatggacgccgaagacccgctgttcatcctctacacctccggcagcaccggcaaacccaagggcgtgctgcacaccaccggcggctacctgctgcaagcggcgatgaccttcaagtacgtgctcgattaccgcgacggcgaagtgttctggtgcaccgccgatgtgggctgggtcaccggccacagttacatcgtgtacggcccgctggccaatggcgcgacctcgctaatgttcgaaggcgtgccgagctacccggacagttcgcgcttctggcaggtgatcgacaagcaccaggtcaacatcttctacaccgcgcccaccgccctgcgcgcgctgatgcgcgaaggccatggcccgctggaaaatacctcccgcgccagcctgcgcctgctgggcagtgtcggcgaaccgatcaacccggaggcctgggactggtacttcaatgccgtgggcgaacaacgctgcccgattgtcgatacctggtggcagaccgagaccggcggcatcatgctcagcccactggtcagcgcccagcgcatcaagcctgggtgcgcgacccagcctatgtttggcgtacagccggtactgctcgatgaacaaggcaaggaattcagcggcgccggcagtggcgtgctggtgatcaaagccagctggccggggcagatccgcagtgtgtacggcgatccgcagcgcatggtcgacacctatttcaaaccctaccccggctactatttcaccggtgacggcgcccgccgcgatgaagacggcgactactggatcaccgggcgcatcgacgatgtgatcaacgtgtccggccatcgcatcggcactgccgaggtggaaagcgcgctggtgctgcacgaccaggtggccgaggccgccgtggtgggctacccccatgatgtcaaaggccagggcatctatgcctttgtcacccccatgaatggcgtggaacccagcgatgcgttaaaaaaacacctgctggacctggtcagcaaagaaattggcagcttcgccaagccggaactgatccaatgggctccggccttgccgaaaacccgttccggcaagatcatgcgcaggattttgcgcaagattgcctgcaacgagctggacagcctgggtgacacttcgaccctggccgatccgagcgtagtggacggcttgatcgacaagcgcctgaaccgataggaaccccttgagtcgccatggaatttatccgcagccgtatcgaaacccagctgatgagcctgaccggcctgtcgctgggccaactggacctggaaaaccccaagggcgacccaggcctgttcgggcccgactcggtgagttggcaagtacatggcgacttcagcagcatgctcatcggcggcatcagcgccttgatgctgcaagccttgcacccgctggccctggccggggtgtgggaccactcgaactttcgccaggacatgcttgggcgcttgcggcggacctcgcagttcatttcgggtacgacattcggctcgcgcaaagacgccgaatggctgatcgaaaaagtccgcaccattcacctgcaggtggtcggccacgcgccggatggtcgcccctatgcggccagcgacccggagctgctgacctgggtgcatgtggcggaagtcagtaacttcctggccgcccacttgcgttaccgcaacccgcacctgtccggtcgcgaccaggaccgttactacagtgaaattgccttggtcgctgaacggctgggtgcacggcatgttccgcgctctcggcaggaagtttcggattatctgacacgcatccgcccgcaattgctgtgcgacgatcgcagccgcgaagtgctgcgattactgctgaatgccccctcacccagcctgctggccaagccatttggcagcttgatgatgcgcgcggggatcgacctgctgccggattgggccagcgccatgctcgaccagcaccagagcccgctgcaacgccagatgatccgtgccggcgtcaagcgcagtgcgccgatgctgcgctgggcgatgcgcaatggttcggtgcaacgcgcccatcgccggatggggttgatgtaggtgacggcgcatagctgttaaacttcgcgccctcaatttcccagcaaggcgcgctccatgtcttccctgaatcaggcgctgcgcgccgccctcgatcatcgccaagacctgatcagcgaactgcatgcccaggccaccgactgttaccggctgttccatggcagccaggaaggcgccggcggcctgaccatcgaccgctacggtccccaattgctggtgcagagtttccaccaatccctggaaaccgccgacctgctggacctgcatcaacaggtcaaccagtacatgggcctggagttgttgctggtgtacaacgatcgcgcccgtggcaattcgcgcattgaccgcgaagacacggtgtatcgcgccgaacccgccgcactggaggacctggttggccacgagtggggcctcagttaccgcgtacgtgggcggcatgccgggcaggacccgctgctgttcctcgacctgcgtaacacccggggctgggtcaaggcccacagcgccggcaaaagcgtgctcaacctgttcgcctacacctgcggcgtgggcctgagcgcagccgccggtggcgcccgtgaggtgtgcaacctggacttcgccgagggcaacctggcggtgggtcgcgaaaacggtttgctgaacccgcaattgccgagcatggagttcgtacagtccgactacttcccggcgattcgtcaattggcgggtctgccgatcacccagcgtcgtgggcaaaagctgccgagttatccgcgcctggagcaacgtcaatacgacctggtgttgctggatccaccggcctgggccaagagcgcgttcggcaccgtcgacctgctgcgcgactaccagagcctgctcaagcctgcactactggcgaccgccgacaatggcgtgctgatctgctgcaacaacctggcgaaagtcagcatggaggattggcgcgaacaggtactgcgttgtgcagaaaaagccgggcgtccggtgcgtgactggcaaatcatgacgcctggagcggacttcccgtcccaggatcagcaaccgcccctgaaaaccctgatacttcagctgtaagaggtttctcaaaggcccttgctcttcggaaccgaaaacccgtgccatactccaaggcactcctgtttgacatagatggcgccgccccatgcccaaaggattgattcgcgccgctggcgccttgttgactgcccttgccctgtacagcttgctgggctttttgattctccccggcatcgcccttcgcatcgccaaccagcagttggccaattacgccacggtgccggcgcggatcgagcgaatcgagctcaacccgttcagcctggagttgaccctgtggggcctgaagatcggcgaacccggcaaggagcaagtcgggttcgaacgcctctacgccaacctgcagatcgacagcctctggacccgtgccctgcacctggccgacgtacagctggacaagcccaagaccgaattgctcttcgacaagtccggccaactcaacctggcgcagttgttcaagctgccgcccagcgagccaacaccggccaatcccgatgccaaaccgttccctttgcgtatcgacagcatcaagctggccggtggttatgtgcacttcgaggacttgcgccccagcgagcccatcgaattcctctacgacacactcgacttcgagctgaagaacctcagcacactgcctgaagacaatgccgacatgaccctggtcgcagctggcccggcaggtggacagatcgactggaaaggcaatttcagcctggtgccgatcacctccgaaggtacgttgaaagtcaccaacggcaagatgaaagcctggtggccctatgtacgtgacgcactgccactggtgcttgaagacggcgtgctcaacttcagcaccgagtacaaattcagcctggccaaagagaccgagctgaacctgaccaacaccgccgccagcatcgcgccctttgccatcaaggcaccggacggccgcccattggtacgcctggaacgcctggacgtcagcgagaccacggtggacctggccaagcagcacgtggtggtcggcaagatccgcagcaacaaactggaaacctgggcggcccttgaggccgacgggcaactggactggcagaaactgttcgccagccagccgagcaaaccggccaaggcgccggaaccgaaaaacgcacccgccaccgccgactcgccaaaagccgaacctgccgcgcccagcaaaccctggcaagtgctgctcaaggacgtgcaactgcgtaactatcaggtgcacctggctgaccgccaggccaagccggcggtagcgctggaactcggcccgctgaacgtcgacctgcagaatttcgacagcctcaaccagagcccgtttaccttgaaggtcgactccggcgtgggcaagcaaggcaagctccaggcgaccggcgaggtcaacctcaacccggtcagtgccaagcttaaagtgaacacccaggacatcgacctgcgggtggcccagtcctacatcagcccgttcatccgcctggaactgcgcagcggcatgctcggcagcaatctggatgtgaacctgaaaagcactgatcctctgaagcttcaggtcaccggccgtgcgcaggtcgaccaattgcacaccctggacaccctcaaaacccgcgacttcctcaaatggcagcggctggtgctcgaaggcgtgaactaccagcacggcgacagcctgtcgatcgacaaggtcaacctgctgcagccgtatgcgcgcttcatgatcaacgatgaccgcaccaccaacgttgatgacctgctgattccgcaagcgcccgacaaaggtcccaagcccgccagcaaggacaagcccttgggcattcgcatcgggcagattgcgatcaatgacggctcggccaattttgccgacttcagcctcacacccaacttcgccaccgcgattcaacagctcaacgggcagatcggcaccatcgacagccgccaggccaaaccggccagcgtcgacatcaagggcaaggttgatcgctatgcaccggtgaccatcaagggcagcgtgaacccgttcgacccgatggcggcgctggacattgcgaccagcttcaaacgtgtcgaactgaccaccctgacgccttattccggcaagttcgccggcttccgtatccgcaagggccgcctgaacctcgacctgcactacgtcatcaccaagggccagttgaaggccgagaacaaagtggtggttgagcaactgcaactgggcgagaaagtcgacagcgccgacgccgtggacttgccgattcgcctggccgtcgctttgctcaaggacagtgacggcaagatctccatcgaactgccggtcaccggtgacttgaacaacccgcaattcagtgtgatgccgatcgtctggcagaccctgcgtaacctggtagtgcgcgcggcaacggcgcccttcaagtttatcggtgggctggtgacgggcggcggctcggaagacctcggcaatgtgtcgttcgccccaggctcaagcgaattgaacaaggatgcggaaggcgccctgaacacgttggctaaagcacttaaggaacgccctaccctgcgcctggaaatcgaaggcacagcggcggccagcagcgatgggccattcctcgctgcccagcgactggagcgtgaataccagtacaactactacaagattcttcagcgtcgtggcgacaaagtacccgcccaggcctcgttgcttgtcgtacccgagaaggaaaaagcgccgttgctggaaggcatctaccgcacccgcctgaaagaacaaccgccggccgagtggaaggacctgagcagcgatgaccgcagcgcgaagctgcgcgacggcgtgatcaagttctggagtggcagtgacgtgctgctacgccaacttggccaggaccgtgccagcaccatcaaggactacctggtggataagggccagctggaagatgatcgggtgtacttcatcgatgccaacctgggccaggctgagaaagatggtcgggtggtcacgccaatgcatctggatgccgagtaacgtctgagcagcactatccaaatgtgggagtgggcttgctcgctcccacatttaatcttcatctgcccttcacagatattccgacccacaatagaacaggccccgacacaagtgccggggcctgtaatgaccacatccgtgtggtcggtcgcatgaactccagaggtgcatttgggtggatatctaactcaccctaagccgccgccgtccagttcagacgaaaacggtgcgttttactctgctttcaggccatcggccgatacagctttaacgcctttgattttcttggtgatgttcaccgcggtagttttctgagcttcagtaaccggagcggtcgaagacagggacactacgcctttgttggtttcgactttaatgtcggtaccaggaatgcctttctcggtaaccaggtcagcttttactttggtggtgatccaagtgtccgaggtggactctttggcaccagccgctgcgcttttggttttgtcgatgttgtcagccttggtagcgccgccagccatcaggccgtcagcagaaacagcagttacacctttgattttcttggtgatggctacagcagtggctttttgcgaatcggagatcgcaacggtcgaggacagggaaaccacgcctttgttggtttctaccttgatgtccgaaccaggaatgcctttttcggtcagcaggtcagctttgactttggtggtgatccaagtgtccgaagtggtttctttagccttggtgacttcaccggcggccaaggtcattggagcttgggaagtctgggcaaaggccacgttagcacccatggccagggtcagagcggtagcagtagcgagagcgaacttcttcatacgagtaactcctgttttattgaaagtctgcagtgtgtgaaccttgatgctgcagcgttaacagggttattgcaggcagtgtgccaagtctgcataagcaattaaatcctttacaaacaatgacttataaaaaacatgaaaattcggattcgtgcaacttgcatgatgccgtctgagcctgcatgcaagttgcggcttttgctttgtattaagcgcctgatttttaggtattttcctgctcccataaaaaaaggactccgaagagtcctcttttcagcgtgaagcctgggggtgattaaacgcccgaagccttggctgctgctacgtccttgatggacagcttgatacggccgcggttgtccacgtccagtaccagcacttccacttcctggccttccttcagaatgtcggtgactttctcaacgcgagcgtcgctcagcatggagatgtgcaccagaccgtctttgcccggcaggatgttgacgaatgcgccgaagtcgacgatgcgctcaaccttaccgacgtagatcttgccgatctctgcctcggcagtgatgcccaggacgcgctgacgtgctgcttcagccgcttccttggtttcgccgaagatcttgatcgagccgtcgtcttcgatgtcgatcgaagccttggtctcttcgcagatcgcacggatggtcgcgccgcctttaccgataacatcacggattttgtcggtgtcgattttcatcgcgatcatggtcggagcattttccgacagttcggtacgggactgaccaatgatctggttcatctgaccgaggatgttcaggcgcgcttccagggcttggcccagggcgatttccatgatctcttcggtgatgcccttgatcttgatgtccatctgcagcgcggtcacacctttggcggtaccggctaccttgaagtccatgtcacccaggtggtcttcgtcgcccaggatgtcggtcaggatggcgaacttctcgccttctttaaccagacccatggcgataccggcaaccggcgccttcatcggtacaccagcatccatcagtgccagggacgcaccgcaaacggaagccatggagctggaaccgttggattcggtgatttccgatacgacgcggatggtgtacgggaacacgtcagcggcaggcagcatggcctggaccgaacggcgggccagacggccgtgaccgatttcgcgacgaccagcgccacccatgcgaccacactcgcccaccgagaacggagggaagttgtagtgcagcatgaacgggtcttttttctcgccttccagggtgtccagcagttgtgcgtcacgggcggtacccagggtcgcaacgaccagagcctgtgtttcaccacgggtgaacagagccgaaccgtgagtcttcggcagaacgccgacttcaatgttcagcggacgtacggtgcgagtgtcacgaccgtcgatacgtggcttgccgttaacgatgttttcgcgaacggtgcggtattcgatttcgccgaacgccgcttttacttcgctggaggaaggctgaccttcttcaccggacagcttggccacaacctggtccttcaactcgcccaggcgcgcgtaacggtcggccttgacggtgatggtgtaggcgtcggagatggcagcgccgaactcggagcggatagcgcccagcagttcagtggcttcagcctgtggagcccaggtccaggttggcttggcagcttcggcagccagttcggtgacagccttgatgacagcctggaactcgtcgtgggcgaacagtacagcgcccagcatctggtcttcggtcagctctttggcttccgattcaaccatcagtacggcttccgaggtaccggcaacgaccatgtccaggctcgatgctttcagttgctcgtaagtcgggttcagcaggtagccggtgctttcgtggaacgcaacgcgcgctgcgccgatcgggccatcgaaaggaataccggagatggccagggccgccgaggtaccgatcatcgcagcgatgtccggatcggttttcttgctggtggaaacgacggtgcagacaacctgcacttcgttcatgaagccttctgggaacagcggacggatcggacggtcgatcagtcgggaagtcagggtttctttctcggaaggacggccttcgcgcttgaagaaaccgccagggatcttaccggcagcgtaagttttttcctggtagtgaacggacagagggaagaagcctttgctcgggtcagcggtcttggcgccaacaacggtcaccagtacggtaacgtcgtcatcaacggtaaccagcactgcgccggaggcttgacgggcgatacggcctgtctcgagggtaacggtcgactgaccgaactggaattttttgataaccgggttcacggtgtcctaccttctttgtggctcttggggaacttgtcttcttgcgaaattcttgggcaatgccgggaatcggcccgacgctcgtccagggtaaaacgtgtatccagataaaacttgaggctgggagcctgccatggaccagcggaaatcccactggcacacggcagacaaccaacctctagcgcaatcgcttattagcgacgcagacccaggcgaccgatcagagtctgataacgacccagatccttgcctttcaggtagtccagcagcttacggcgctggtttaccatgcggatcagaccacgacgcgagtggtggtctttaccgttggccttgaagtgaccttgcagcttgttgatgttgtgggtcagcagtgcaacttgcacttctggcgaaccagtgtcaccaacagcttgctgatagtcagcaacgatttgtgctttttcttgaacgtcgagagccatgaggcaatcctttttttcaggaaaccacccaaagggcagtttcaacaggccagggacaaatccctgtatctaaaaatgagtagtgaccgtgcctgttaacagccaccctcgttcggtcattctgaccgaatcagtcgacgtggcgctatacgcccgtcttcgctcacttcaccgataccgataaagcgaccgttatgatcctgtactcgcaccatgccgaacttcggggcatccggggcacgtaccggctggccgttgagccagtagaacgcgctgtgctccgagaagtgcagcaatggccaatcgagcaaaccgctgtccgatggcatcaggaagcgatcaactgcttcattgccgccttcggcgtgtaccgcttccaactcttccaacgtgaccgtctgggccaggctgaaaggaccggcctgggtgcgtcgcagttctgcaacgtacgcgccgcaaccgagcttttcaccaatatcttccaccagggtacggatataggtgcctttgctgcagtccacggccaaccgggcggtgtcgccttcacaggcgagcaattccaagcgcgcaatagtaacagaacgcggttcgcgctccactacttcgcccgcacgtgccagcttgtaaaggggttgtccgtcacgcttgagcgccgagtacatcggcggtatctgactgatttccccacgaaaagcgggtaaagccgcttcaatatcagcacgaccaacggtcacgtcgcgaacctgcaaaacatcaccttcggcgtcggccgtggtggtggtcttgcccagttgcatcagggtttcataacccttgtcggaatcgagcaggtattgggagaacttggtggcctcgccaaagcacaacggcaacacgccggtggccaggggatcgaggctgccggtgtgcccggctttctcggcattgagcagccagcggaccttctgcaacgcggcattggaggtaaagccaatgggtttgtcgagcagaatgatgccgctgacgttgcgacggatacgtttgacctgagccaccgcttactccttggcgtcttcaggtgtggacgggtgctggctgtcttcagccacggcgcgctcgatcagggccgacaggtgtgcaccccgcacgacgctttcgtcgtagtggaagtgcagctggggcacgctgcgcagcttcatttcacgggccaactgcatgcgcaggaaacctgcagccgagttgagcaccttgatgctttgcgcgatttcttcgctgctgtcctgccccatcacggtgatgaagatcttggcgtgacccacgtcacggctcacttcaacggcggtgatggtgaccaggccaacgcgtgggtctttgacttcgcgacggatcagttgggccagctcgcgctgcatctgatcgccgatacgctgggtacggctgtattcttttgccatgtcttgttacctgttactgccacacggtgaaacccgtggggtctgaaagcggcaaacgcccggcctgacaaaagccagaccgggcgttgcgtttagagtccgtacgctgcgcggggcatttgcatgcccacgcgctgcgtggctcctgaagtgcgcgagttagaggctgcgagcaacctgaaccttctcgtagacttcgatcttgtcaccagccttgacgtcgttgtagctcttgacgccgataccgcattccatgccggcacgtacttcagaagcgtcatccttgaagcggcgcagggattccagctcgccttcgaagataacgatgtcttcacgcagtacacggattggacggttacggtacacggtgccttcaaccaccatgcagccggcgatcgcgccgaacttcggcgagcggaacacgtcacgtacttcggcgatacccaggatgttctcccggacgtcgctgccaagcatgccggtgagggctttcttgacgtcttcgatgatgtcgtagatgacgttgtagtaacgcatgtccaggccttcctgctcgacgatcttgcgagcgccggcatcggcacgcacgttgaagccgaacagtacagcgttggaagccagtgccaggttggcgtcggactcggtgataccaccgacaccgccaccgacaacgcgcacttgcacttcgtcgttacccaggccgttcaaggcgccgttcaacgcttcgagggaaccacgtacgtcagatttgaggacgatgttaagcgtcttcttctcttcctggcccatgttctcgaagatgttttccagcttgccggcgtgagcacgggccagcttgacttcacggaacttgccttgacggaacagagccacttcacgggctttcttctcgtcggctaccacgctcatctcgtcgccagcgtccggagtaccgtccaggccaaggatctcgaccgggatagcaggacctgcttccttgattggcttgccgttctcgtcgagcatggcacgtacacggccgtagttcgaaccgaccagcaccatgtcgccttggcgaagggtaccgtcttgaaccagaacggtcgcaaccgggccacggcccttgtcgagacgggattcaaccacaacaccacggccaggagccgatggcgtagcagtcagttccagaacttcggcttgcagcagaacggcttcgagcagttcgtcaacaccagtacccatcttcgcggagaccggtacgaatggagtgtcgccaccccactcttcggatgtcacgccgtgaaccgacagttcgctacggatgcgatcaagatcggcgcccggcttgtcgattttgttcacagcgactaccaacggaacgccagctgccttggcatgctgaacggcttcgatggtttgtggcatcacgccgtcgtccgctgcaaccaccaggatcacgatgtcggtcgccttggcaccacgggcacgcattgcggtaaacgcagcgtgaccaggggtgtcgaggaacgtcaccatgccacggtcagtttcaacgtggtaagcgccgatgtgctgggtgataccgccggcttcgcctgcggctaccttggcacgacggatatagtcgagcagggaagttttaccgtggtcaacgtggcccattacggtcacaaccggtgcacgggaaactgcctcaccttcaaacttcagggactcggccagggaatcttccagggcggtgtcgctgaccagggtcactttgtggcccaattcttcagcaacaagctgggcagtttcctgatccagtacctggttgatggtggccggagtgcccagcttgaacatgaacttgatgatttcagcagccttgaccgacatctgctgggccagatcgcccacagtgatggtctcgccgatcttcacttcacgcacgacagggccggttgggctctggaaaccgtgggcgttgcgtttcttcagcttggccttgccgcgaccaccacgacggaagccatcgctttcttcgtcggtagtgcgtggggcaacgcgtggcgcaggcgctttctctttgaccgaggcacgatgcggagcgtttttgcgctcgccatcgccaccaccaccgcgacgattgttatcgtcggcacgcggtttgtccggacgacgaggttcgtcgcgcttgcgagcgtcagcagccggtgctggtgcagcggcaaccggagcggcctcacgcacagcttcaactggcgcgctaggcgcagcgaccgcttcagtggcagcaggttgcgcagcagcaggctggcgacgcgcttcttcttcggcgcgacgcttggcttcttcttcagccttctgacgagcagcattttctactgcgcgacgttcttccagttcgcgtttgcgctcggcttcgatttcttccgggctgcgctgtacgaagactttcttcttgcgtacttcaacgctgatgctcttgctaccagcaacacgcagggtgctggtggttttgcgctgcaatgtaatcttgcgcggttcttccactttcgccttgtggctgctcttcaagtgagtcagcaaagactgcttctcactatcgctcacaccttcatcggcggcggtgtgcggcagacctgcctcacgcatctgctgcaacaggcgctctaccggtgttttgacctcatcggccagttgtttcaccgtgacttgcgtcatgcacttctctcctcaggccgcgcctagttactcgaaccaatgggctcgggcggccatgatcaacttgccggcacgatcatcgtcaatgccgtcgatgtcgagcagatcgtcaatagactgctcggccaggtcttcgcgggtaattacgccgcgcaccgccagttccatcgccaaatccttgtccataccctcaagcgagagcaggtcttcggccggatgggcgtctgccagcttttcctcagtagcgatggctttagtcaacaaacgatccttggcccgagcgcgaagctcgttgacggtgtcttcgtcaaagccgtcgatgttgagcatttcttccaacggtacgtaggcaatctcttccaggctggtgaagccttcatctaccagcacctgcgccaggtcttcatcgacttccaactcttcgatgaagttgcgcaggatgtcaccggtttcagcttgctgcttagcctggatgtccgattcggtcatcacgttcagggtccaaccggtcagttggctggccagacgcacgttctgaccaccacgaccaatggcctgagccagattgtctgcgccaacggcgatgtccattgcatgggcatcctcgtcaacgataattgccgccacttcagccggcgacatggcgttgatcacgaactgcgccgggttatcgtcccacaggacgatgtccacacgctcgccacccaactcgcccgacaccgcctggacgcgcgaaccgcgcataccaatgcaagcgccttgcgggtcgatgcgtttgtccttggagcggaccgcgatcttggcacgcgaacccgggtcgcgggacgcagccatgacttcgatcaggccttcggcgatttccggcacttcgatacggaacagctcgatcagcatttccggcgcggtacgcgacaggatcaactgtgggccgcggttctcggtgcggatttccttgagcagcgcacgcagacgcacgccaacacggaaggtttcgcgggaaatgatgtcttcgcgagccagcaacgcttcggcgttgttgcccaggtcgacgatcacgttatcgcgggtgacctttttcacggtgccggagatgatttcacccaggcgctcgcgataggcgtcaacgacttgagcgcgctcggcttcgcgaaccttctgcacgatgacctgtttggcggtctgtgcagcgatacggccgaattcgatcgattcgatcttttcttcgacgacatcaccgaccttggcaccaggatgcgtttcggcaaccttgcttggccaggtttcgatggccggatcatcaagatcggcttcttcgacgaccgtccagcgacggaaagtctcataggcaccggtgtggcggttgatttccacacgcagatcaacttcgtcttcaaaacgcttcttggtagcagtggccagggccagctccagcgcttcaaaaatcacgtttgccggtacgcccttttcattggataccgactcaacaaccagcagtacttctttgctcatcgtacgcctcgcctttcgcaagccattggatccgcgggatccgcgtctcagtcaaaactgggaataatgttggccttgtcgatcatatcgatcggcaacaggaactcatggtcttctacctgcaccacgacatcctgctcttctacaccgcgcagaaggccctgaaagttgcgtcgcccttcaaagggagagcgcagcttgatcttcacttgttcaccggcaaattttgcaaactgatcaatagtgaacagtgggcgttccatgcctggcgaggaaacttcgagggtgtattcaacggcgatcggatcttcaacatccagcacaccgctgatctgacggctgacaatggcacaatcgtccaccagcacgccgccctctttatcgatataaacgcgcaacattgagtggcgaccttgagccgaaaactcaataccccagcattcatagcctagggccacgaccaccggggccaacaaggcctgcaactcttctagcttgctcgacacctgaaccccctcgtgcatgtatgtgcatgctgtgcaaaataaaaaaatgggcgaaacgcccatccttgaaacgccgtcgaacagcggcgttgaaagtgtccagctaacaaaaagccccttaaaaggggctccgctaaaactggttgcgggggccggatttgaaccgacgaccttcgggttatgagcccgacgagctaccagactgctccaccccgcgacaaagctggggcggaagtatacgaccgatcccttaaagggtcaatgtaaccttccacctacaagaaagcccgcaacagcgggctctcctgataattggtaccgagaaggggactcgaacccctacaccctatgggcacaaccacctcaaggttgcgtgtctaccaattccaccacctcggcaatacagcgtttacaacccttcttacttctgctcttgagctggaggtacgtcagtcgctggaatagccgacttttgctcttgaagcaccgggacatcatcagaagccggttttgcttttggtacttccaacactgctggatttgggagacctacttgagtcagcacatgagctttctctttagcaaagtaacctaaccccaagctggttatgaagaaaccggcggcaagtatagcagtaaacttactaagaaaggtagaggaaccttggcttccgaacacagtatttgaagcacctgcaccgaaagacgcaccagcatccgcacctttaccctgttgcagcaaaaccagagcaactacgctcagagcagccaacagatgaaaaacgactacgactgtttccagcattttttcagtttcccgcggcgcgacaaatcgcaccgaactcatctgcattcagggaagctccaccaatgagccccccatcgatatccggcatgccgaacagttcgaccgcattggccgccttcacgctgccgccgtatagaagccgcacaccttgtgcgacttcagaattctctgccgccaactgcgcacggatggctgcgtgcacatcctgcgcctgttgcggtgtagcagtcagcccggtgccaatggcccagaccggctcgtaggcgattactgcctttgcaaacgcaccaacacccagctcctcgatgatgctgcccagctgacgcgagacaacttcaagagtcttgcccgattcgcgctgctccagggtctcccctatgcacaacaccggaatcaagccacaagcctgtgctgctgcgaacttgcgattgagcgtcccatcacgctcgcccatcatctgacggcgctcggagtgcccgacaagcacgtaggaacaacccgcatcgaccaactgactcggcgctatctcaccggtcaatgcaccttgcatggcttccaccgcagaattctgcgcgccgacctggatcgacttgcccttcaagccatcaaccacttgggtgatatgcaagcaaggcgggaaaaccgcgacatcaacaccgctcggcaaggccaagtgacgaaggccattgatcagctcagcgacactggcgcgggtaccgtgcatcttccagttaccagctaccatagtgcgacgcatgctgtacctcgtcggtcaaagtgggcgcagatgttacccaaccacatcatcactggcaagccgaattcaggcgcaaacttcagttaccagttttgccaggtcttcggcatggccgcgaacctgtgtttcatcgtcaccttcgaccatgacacgcaccaatggctctgtgccggacttgcgcaacagcacacggccacgccccgccattgccagggttacacgctcgcatgcctctttgacagccggatgctcaataggattttcaccgccagcaaaacgcacattcagcaatacttgcggacacttgcgcatagcttggcgcgcctgggccaggctctcttcacgacgcttcatggccataagcacctggagcgcagcaatgatcgcatcacctgtcgtggtgtgctggaagcagacaacgtgcccggaattctcgccacccacctgccagttgcgctcaagcagctcggcgatcacatagcggtcgccgacattggcacgcacgaacggaatacccagatccgccaaggccagttcaagccccaggttactcatcagcgtaccgacgacaccaccttgcagcttgttacgctcatgcatgtcgcgggcaatgatgaacaggaggtcatcaccatcaacaatggcgcctgtgtggtccaccatcagcacgcgatcaccgtcaccgtcgaaggcaatacccaggtcggcatgctcggcaaggacggccgcctgtaactgctccatgtgggtggagccacagttctcgttgatgttcaatccgttaggctgagccgacagcaccgtcacgtctgcgcccaactccttgaatacgctcggcgccaccttgtaggtcgcaccatgggcgcaatcgaccacaatcttcaggccggcaaaattggtgctgcttggcacgctgcttttgcagaactcaatgtatcggccggaggcgtcgttgatacgcgacactttgccaagcttgctggactcgaccaccgtcatcggcgcatccagaagctcttcgatcatcagctcgatctcgtccgggagcttggtgccctggcccgagaagaatttgatgccgttgtcatcatgagggttatgcgaggcactgattacgataccggcttcagcatgaaaggtacgcgtgaggtaagcgatcgccggcgtcggcatcggccccagcagcatcacatcggcacctgcggcagacagccccgcctccaacgccgactcgaacatataccccgaaatacgagtgtccttgcccactaggatgcggcacgcgcccatgctgcggaacgccatacctgcagcccaaccgagcttgagcatgaaatcaggagtaattgggaactcgccgacccgaccgcgaataccgtcggtaccaaaatattttttagtcataagtgctccatcattcttattcggctgattctaccgcggccatcatacgcaccacatccatcgtctcgacaacatcatgcacccgcaagatacgcgcccccttggtgactgcaagcgccgccagcgcaagaccgccgtacagccgctcgcccacaggacgattcagcgccagcccgatcatgctcttgcgtgaaacgccgaccagaagaggccgaccaagggcatgcaaggactccatatgtttgaacagacttagattgtgctgcagggtcttggcgaagccaaaaccgggatcgaggacgatcttttctgcagcaatcccggcagcagtgcattgcgcaacccgctcggcaagaaacccactcacctcaccaacaagatcatcgtagtgagggttgtcttgcatattgccgggctcacccagcatatgcatcaggcaaaccggcaaaccggtggccgcagccgcatcaagcgcaccgtcacgctgaagcgagcgcacatcgttgatcagccccgccccaaggcgcgccgtctcacgcatcacggccggcgtcgacgtatcaaccgagatgatcacatccagctcacgtgcaatgcgctcaacaattggcgcaaccctctccaactcttccaggggagaaacgatgcgagcgccaggccgcgtcgactccccccccacgtcaatcaacgtcgcgccagccgccaccatcgcctcggcatgacgtaacgccgcatcgagttgactgaagcgaccaccatcggaaaaggagtcgggggttacattgagaatgcccatgacgtgcgtatgggccaaatcaagaacccggttgccgcaaggcaaccgggtggaggacaacacagaagtcatttcaaaccttagacgtcagctgcgggaccgccaatcggggtttcagggcgttcgttctgaaccactggcggagtgccagaagtgcccgaaccaccttcccaatcgcgaggctcgcgcggcgtgcgaccggccatgatgtcgtcgatctggtcggcatcaatggtctcgtacttcatcagcgcatctgccatggcatccagcttgtcgcggttgtccgtgaggatctgcttggccgtgccgtagcactggtcaatgatgctgcgcacctcggagtcgatcagcttggctgtctcaccggagaagctggcgttttgaccaccaccgccacgccccaggaacacttcgccttcttcctcggcatacatcaatggaccgagtttttccgacaagccccacttggtcaccatgttccgcgcaatctggctggcacgcatgatgtcgttggaagcaccagtggtgacgccgtcgaagcccagggtcatctcttcagcaatccggccgccgtacagcgagcatatctggctgatcagtgcacgcttggagaggctgtaacgatcctcttccggcaggaacatcgtgacacccagcgcccgaccacgcgggatgatcgacaccttgtagaccgggtcgtgctcaggcacgacacgaccaacgatggcgtgaccagcttcgtgataagcggtgttctgcttctctttctcggacatgaccatggatttgcgctcggcgcccatcatgatcttgtctttggccaattcgaactctttcatctccacgatacgcttgccagtacgggcagcgaacaacgaggcctcgttgaccaggttagccaggtcggcaccggagaagcctggagtaccacgggcaatcacggccggagccacgtcgtcgcccatcggcactttgcgcatgtgcactttcaggatctgttcgcggccacggatatccggcaagcccaccacaacctgacggtcgaaacggcctggacgcagcagcgcagggtccagcacgtcaggacggttggtggcagcgatcacgatgatgccgtcgttcatttcaaagccatccatctcaaccagcaactggttaagggtctgctcacgctcgtcatgaccgccgcccataccggcgccacggtggcgaccgacggcgtcgatttcatcgatgaagatgatgcaaggcgcatgctttttagcctgttcgaacatatcgcgaacacgactggcaccaacaccgacgaacatctcgacaaagtcagaaccggaaatggtgaagaaaggcaccttggcttcaccggcaattgccttggccagcaaggttttaccggtacccggagggccaaccatcagcacaccgcgaggaatacggccacccaggcgctggaacttgcccggatcgcgcaggaactcgaccagctcgcccacttcttccttggcttcgtcgcaacccgcaacgtcagccagggtggttttcacctggtcttcagagagcaggcgagccttgctcttgccgaagctcatcgggccgcccttgcctcccgcaccgccttgcatctggcgcatgaagaacatgaacacggcgatgatcaccaggatcgggaagctggctaccagcaattgggtccagatgctctgctgctcaggctgcttgccttcgaccaccacgtgattatccaccaggtcgccgatcagaccgttgtcctggattgccggacgaatggtcttgaagctgtcgccatcgttgcgtttgccggtgatcacgtagccatcaaccgctacgcgctcgaccttgccatccttaacttgctggatgaagtcggaatagttgagggtctgcggctcgttagggctggagaagttgttcatcaccgtcaccaggacagccgcgatgatcaaccacaggatcagattctttgccatatcgttcaattaactaccctctgaagcaagctccgctactggcgcgcgcttcgcatgatattcaccggcctaacttactacattacctacaacactggcaggcgccgtctgtaaccctttgtgaaactttgactacacaatattcgtaaagcttcgtgacgaaagcgatataaaaaaacctatcgactcccttcaaaccttcaaagacgctcatcactggcggcgccttcgatgccacggaacccccgcgccaacagatactgctcgcgagaccggtcacgcgaggagtccggtttgcgcatctgtaccttgtcgaacagcttgcgaatgttcttgtggtactcgtcgaaaccttccccctggaagaccttgaccaggaaatcaccacccggacgcaatacccgacccgccagatccagtgccaattcgcacaggaacatggctcgcggcatatcaacagccggtaacccactcatattgggtgccatgtcggaaatcacaaggtccacctgcgaatttcctacagcttccaggatctcggccaggaccgcatcctgggtgaagtcaccatgcacgaaggtcacatccgggatgctgtccatctccaggatgtcagaagcgatcaatcggccttgcccaccaatcagacgactggccacctgggaccagccacccggggcagcgcccaggtcgatcacactcatgccggggcgaaacaatttgtccttgtcctggagctccagcagtttgtagctggcccgggaacggtagccgtccttttgcgcctttttgacgtaaggatcgttgaaatgttcttgtagccacttaaggctggttttggaacgggccacgggccacctcgaaaaataaaacgggtcgtgattaactgggcggtcccggactcgctcgggtaaactggccgccgctttttacaagatcagacgcaggggtcagattatgccgctcactcaagagcagaagaaacagtacaaatccattggccaccatctgaaaccagttctgattgtggcagataacggtttgactgaaggtgtgttagccgaattcgaacgtgcgctgaacgatcatgaactgatcaagatcaaggtcaacatccttgatcgcgaagcgcgcctggctgccattgcagaactgtgcaaggcaggcaaagcggacctggtccaggtcatcggcaagatggcgctgctgtatcgcaagaacttcagcgtcaacaaacaactgtcgaacgtacaccgcttcaaatagctttaaaattacaaaagggtcacgggcgtgcttcgcgcgccccgccactccatcccggcgcaggctgcaaaaccagcaccaggccggagaaccctagcacaagatagctgaatagctgccagcgcaacgcttccggcaaccagacatgcaccacgcaaaacattgcgcatgcatacagcgccatcaacagcagttgcccgcgaatatcccgccacaaactctccaaaccctcggccttgaccagcaccaatgcctggagcgtcacgcacgccgccgcaaatcccaccaacagcgcactgagcaatccatcgatctcattgatcagcagcggtgccaggcctatcaggccgagcgccggcagcacaccaatgtgcaacaaccaaaggccgcccacccaaagcatctgggagagctgccaaagcatggcgcccgcacgaagcgggcgccgtctttcagacgtgacgaacttcaacaatctcgtactcgattacgccacctggcgtctttacagccaccacatcaccctcttccttggcaatcaaggcacgggccagcggggaaccgacggagattttgccgagtttgaaatcagcttcatcctcaccaacgatgtggtagaccacgctttcgtcagtttcaacgttggcgatttccacggtggtgccgaagatcaccttgcccgtcttcggaatggtcgtcacgtcgatgaccaccgagttttgcaagcggccttcgatgtcacggatccgcgcctcgaccataccttgctgctcgcgggcagcgtggtattcggcgttttccttcaggtcacccagttcgcgggccgtaccgatgtcctggctcagcttcggacggacgaccttggtcagatgggcgtgctcctcttccagggccttgaagccctggacggtcattgggtatttggtcatgccttcaatcctgcgtgtagatcctgcaagcggcgcacggtcttttcaggaccgaacttgagcgcttcgcagatggcttcgccagcagcaatggtggtggtgcagtagatcttgtgctgcaaggcgttacgacgaatggagtaggagtccgcgatcgactggcgaccttcggtggtgttgatgatcagggtgacttcgtcgttcttgatcatgtcgaccacatgcggacggccttccgtcaccttgttcacgcgacgcactttcaggccggcagcttcgatcagcttggcggtcccggcggtggccacgacttcaaagcccaagttgatcagatcacgggctacgcctgcaaccagtggcttgtcgtcatcacgcacgctgatgaacgcagtaccgccggtcggcagcacttcgctggcgcccatctgggccttggcaaaggcttcaccgaaggtatcgcccacacccatgacttcaccggtggacttcatctctgggcccaggatcgggtccacgccagggaatttggcgaatgggaacaccgcctctttcacgctgtagaagttcggaatgatttccttggtgaagccgatttccttcagggtcttaccggccatcacgcgcgcagcgatcatggccagggagacgccgatgcacttggaaacaaatggcacggtacgcgaagcacgtgggttgacttcgatgacgtagatgtcttcgccttgcagcgccaactgtacgttcatcaggccaactacgcccagttccagggccattttcttgacctgttcgcgcatctcgtcttggatgtgcgctggcagcgagtacggtggcagcgagcaagccgagtcaccggagtgaacgcccgcctgttcgatgtgctgcatgatcgcgccaatcaccacgtcggtaccgtcgcacaccgcgtccacgtccatctcgatggcgcagttgaggaagtggtccagcagcaccgggctgtcattggacactttcaccgcatcgcgcaggtaacgcttgagttcttcttcttcgtagacgatttccatcgcacgaccgcccagcacgtaggacggacgcaccaccagcgggtagccgatcttgctggctgcgcggatggcttcgtcttcactgcgcacagtggcgtttggcggctgacgcaggttcaggcgctcaaccatttgctggaagcgctcgcggtcttctgcacggtcgatggcgtccgggctggtaccgatgatcggcacgccggcagcttccagggcacgcgccagcttcaggggggtttggccgccgtactggacgatcacgcctttgggcttctcgacgcgcacgatttccagcacgtcttccaaagtcactggttcgaagtacaggcgatcggaggtgtcgtagtcagtggaaacggtttccgggttgcagttgaccatgatggtctcgtagccatcttcgcgcagggcgagggcggcgtgaacgcagcagtagtcgaattcgataccctggccgatacggttcggaccgccacccaggatcatgatcttgtcgcgacccgacggcgcggcttcgcactcttcctcataggtggagtacaggtaggcggtgtcggtggagaactcggccgcgcaggtgtcaacgcgcttgtagaccgggaagatctccagcttgtggcgatgggtacgcaggttcttctcggtcacacccagcagcttggccagacgttgatcagagaaacctttgcgcttgaggcggaacatcatgtcgcggtcgatgctggccagacccagggtcttgaccttctcttcttccttgatcagatcttcgatctgcaccaggaaccacggatcgatcatgttcatgccgaagatatcttcgacggtcatgccggcgcggaaggcgtccgccacgtaccagatacgctcggcgcccggcacggtcagctcacgcttgagcacgctcatgctttccgggttgctcaggtcgagcttctcgtccaggccgcaaacgcccacttccaggccgcgcagggctttctgcagggattcctggaaggtacggccgatggccatgacctcaccgacagacttcatctgggtggtcaggcgcgcgtcagccttggcgaatttttcgaaggcaaaacgtggcagcttggtcacgacgtagtcgatggacggttcgaaggacgccggagtcttgccgccggtgatgtcgttcgacagctcgtccagggtgtaacccacggccagcttggccgcgaccttggcgatcgggaagccggtggctttcgacgccagggccgacgaacgggaaacacgcgggttcatctcgatcacgaccatgcggccggtgttcgggcagatgccgaactgaacgttggaaccaccggtttccacgccgatctcgcgcagtaccgccagggaggcgttacgcaggatctggtattccttgtcagtcagggtctgtgccggagcgacggtgatcgagtcaccggtgtgcacgcccatcgggtcaaagttttcgatggagcaaacgatgatgcagttgtccttcttatcgcggacaacctccatctcgtattctttccagccgatcagggattcgtcgatcagcagctctttggtcggcgacaagtccaggccacgggcgcagatttcttcgaactcttcgcggttgtaagcaataccgccaccggtgccgcccatggtgaaggacggacggatgatgcacgggaagcccagggtctcgaggaccgcattggcttcttccatgctgtgggcgataccggaacgcgggcaggccaggccgatggacttcatggccttgtcgaagcgcgaacggtcttcagccttgtcgatggtatcggcattggcaccgatcatctctacgccgaacttttccaggacgccttcgcgctccaggtccagggcgcagttcagtgcggtctggccacccatggtcggtagcagcgcgtccggacgctccttctcgatgatcttggcaacggtctgccacttgatcggctcgatgtaggtggcgtcggccatggccgggtcggtcatgatggtggccgggttggagttcaccaggatgacgcggtagccctcctcgcgcagggctttacaggcctgggcgccggagtagtcgaattcgcaggcctggccgatcacgatcgggccagcgccgagaatcaggatgctttttatgtctgtacgttttggcatgggtttgtcactcaaatccgcaggtcagtcggcaagccgtcttgaacaatctttgaagagcctgcgggggccaccgacattcggggccgcccgcaggccgctcagtcagcgtcgcttggccatctcattgatgaaacggtcgaacagcggcgctacgtcgttcgggcccgggctggcttcagggtggccctggaagctgaacgcgctcttgtcggtgcgctcgatgccctgcagggaaccgtcgaacagcgacttgtgaatggcgcgcacgttgctcggcagggtggcttcatctaccgcaaaaccgtggttctggctggtgatcatcacaacgccggtgtccaggtcttgtaccggatggttggcgccgtggtggccgtgccccattttcagggtcttggcgccggaggccagggccagcagctggtgaccgaggcagataccgaacaccggaatctcggtttccagcacttccttgatcgcctggatggcgtagtcgcatggctcagggtcacccgggccgttggacaggaacacgccgtccggttgcagggcgagcacgtcgctggccggggtttgcgccggcaccacggtcacgcggcaaccgcgctcgaccagcatgcgcaggatgttgtacttcacgccgtagtcataggccactacgtggtaaggcagatctgcggcttcgatagtcgcatggctgtcggtcttcaagtcccagaccgtggagcgccattcgtacttctctttgacgctgacgactttcgccaggtccatgcccttcaggccagggaagccctgggctgcggcaatcgccgcctcctcggaaatattgtcaccgaccatgatgcagccgttctgcgagcctttctcacgcaggatgcgcgtgaggcggcgtgtatcgataccggcgatcgccaccacgttgttggctttcaggtaatcggacagcgacatcgtgttacgccagttgctcgcaaccagtggcaggtcacgaatcaccagacccgccgaccagacacgatcagactcgacgtcttccggtgtagtaccggtattgccgatgtgcggataggtcagggtaacgatctgttgggcgtaggaaggatcggtaaggatttcctgatagccggtcatggcagtgttaaacactacctctccaacggtctgaccgtcggctccaatggcttcgccgcgaaaaatgctgccatcagcaagggcgagtatggctggcttagtcaagaagacctcccgtaaataaagcctgaaagggcgatcgcaggttgtaaaaaagcggagtgacgtatggacacgtcaccccgcttcttcaccgaattattctgcgcgcttttagtggacacactaaagctgtagcttacagaaaaaggcttttttggtccaccgctaatgagccttaaaggcaggggaatgcgacaggacgtcgcttagcgggtaaaaacggggcctaagcataagcttgaggccccgttttagctactgattagtgcagatccagcacatcgcgcatgtcgtaaaggcccgcctcgcgcccctccaaccagagcgcagcacgcaccgcgcccttggcaaacgtcatgcgactggacgccttgtgcgtgatttccaggcgctcgccctcagcggcgaacaacacggtgtggtcacccaccacatcacccccacgcacagttgcaaagccgatggtgtcgcgcgcgcgcgcaccggtgtggccttcacggccatacaccgccactttcgacaagtcgcgacccaacgcatcggcaatcgcttcgcccatgcgcagagcagtacctgacggcgcatcgatcttgtggcggtgatgggtctcgatgatttcgatatccgcttcatccccgagcacacgggcggccaaatcaagcagcttgagcgacaggtttacacccacactgaagttggccgcgaagacgataggaatatccttgcccgcctccaccaacagctgcttctgctcaagcgtcaaaccggtggtgccgatcaccatcgccttgcccgccttgcggcagaacgccaggtttttcagcatcacgtccggcagggtaaagtcgatcagcacgtcgaactcgtcagctacctgctccaggttacccgacaacgaaacgccgatgcgccccagtgaagccaactcaccggcatctgcaccgatcaacgtgctgcccggacgaacgatcgccgcggtcagcccggaggccggcgagcgttgctgtaccgcctcgaccagtgtcttgcccatgcgcccggcagcgcccattacggctatacgtcgcatactcaattccttacaggtcgccgaagaagcgcttcacgccttcgaaaaagccagaactttgcggcgattgagagctgttaccgtccaacgaactgcggaactcttcaagcagctcacgctgacgacgatccagattgaccggagtctctaccgccacacggcacatcaggtcaccagcaccgccgccacgcaccggcgcaacgcccttgccgcggatacggaactgcttgccggtctgcgtgccctcagggatcttgagcttgacccgaccgtcgagagttggaatctcaagctcgccacccagcgccgcatcaacgaagctgatcggcacttcgcagaacaagtgcttaccgtcacgctggaagatcgagtgctcgcgcacattgatcaccacgtacaagtcgcccgtagggccaccctgagtacccgcctcgccttcgcccgacagacgaatacggtcaccggtatccacacccgccggcactttcaccgaaagggttttgtactcttcgacacgaccttcgccatggcacgagtcgcacgggtcggaaatgatcttgccctgaccatgacaacgtggacaggtctgctgcaccgagaagaagccctgctgcatacggacctggccaataccgccgcacgtcgggcaggtgatcggcgaagaacctttcttggcccccgaaccgtcgcacggcttgcagttgaccagcgtcggcacacggatattcacgctggtgccgcgcacggcttcttccaggttcaactccagggtgtagcgcaagtcgctgccacgctgggcgccgccacgctgaccaccccggccaccgccgaagaagtcactgaatacgtcaccgaagatatcggagaagttctgaccaccaaaaccggcaccgccgccacccatgctcgggtcgacgccggcatggccatactggtcgtacgccgcacgcttgttgggatcagacagacattcgtaggcctcattggcctctttgaacatttcttcggattctttgctatccggattacggtccgggtgatgcttcatcgccaggcgacggtaggccttcttcaggtccgcctcgctggagccgcgctccacacccaatacttcgtaatagtcacgctttgccataagtctttgcactcttaaggacgttcagccagaccctcctgagccttgccaaactcgttgagccccaatacaggcccggacccaactcacgtcaattcaacgatcctggtcattactacttttagccaggtacccggccaaaaatgcggtatttactgctcggaaagcaggagcattcccgatcacaccgccagcatccgaacactgtcgcatgctgtaaaaattcgcataccccagacacgccaacgcgggagcaagctcccgcgcggcgacatcctaccagtcaccgcttgatagcggtcaaccgggcgaccaacttacttctggtctttgacttcttcgaactcggcgtcgacaacgtcgtcgtgcttggcttcaggctctgcgtgctgcgcagcaccgtcagccggctggccttgttcggcgtacattttctgagccactggcgcagagactttcgacagctcttcgatcttggcttcgatagccgccttgtcgtcgccttttacagcggcttccagggcaactacagcagcttcgatggcagccttctcttcagcagtcactttatcgccagcatcagcgaccattttgcgtgtcgagtgaaccagtgcgtcaccctggttacgggcgccagccagctcggcaaacttggcatccgcatcagcgttggcctcagcatcacggatcatctgttgaatttcttcatcagacagaccggagttggccttgatggtgatcttctgctctttgccggtggccttgtctttcgcgcctacgtgcaggatgccgttggcatcgatgtcgaaggtcacttcgatttgtggcacgccacgtggtgctggtggaatctcggccaggtcgaacttgcccagggacttgttctgagccgcttgcttacgctcaccttgcagcacgtgaatggtcaccgcgccttggttgtcgtcggcagtcgagaacacctgggatttcttggtaggaatcgtggtgtttttctcgatcagcgccgtcatcacgccgcccatggtttcgatacccagagtcagcgggctgacgtccagcagcagcacgtctttgacgtcgccggccaataccgcaccctggatggcagcacccatggcaactgcttcgtccgggttcacgtctttacgcgcttctttaccgaagaactcggtaactttctgttgaaccagtggcatacgggtctgaccgcctaccagaatcacgtcgttgatggagccaacgtcgataccagcgtctttcaaagcgatgcggcaaggttcgatggtgcgctgaaccaggtcttcaaccagtgcttccaacttggcgcgagagatcttcacgttcaagtgcttaggaccggtggcgtctgcagtgatgtacggcaggttaacgtcggtcgacatgctcgaggacagttcgatcttggccttctcggcagcttctttcagacgctgcatggccagcgggtcacccttgaggttcatgccgctttctttcttgaattcgtcaacgaggtagtcgatcagacggatgtcaaagtcttcaccacccaggaaggtgtcgccgttggtagccaacacttcaaactggtgctcgccgtcaacttcagcgatctcgatgaccgacacgtcgaaggtaccgccacccaggtcataaacgatcacggtgtggtcgcctttggccttgtccataccgtaagccagagcggctgcggttggctcgttgatgatacgttttacgtccaggcccgcaatacggccggcgtctttggtcgcctggcgctggctgtcgttgaagtaggccggaacggtgatcaccgcttcggtcactgtttcgccgagatagtcttcggcagtcttcttcatctttttcaagacttcagccgagatctgcggcgcagacatcttgttgccatttacttcaacccaggcgtcaccgttgtcagccttggcgattttgtaaggcaccatcttgatgtctttctgtacgacttcttcgtcgaacttacgaccgatcagacgctttaccgcgtaaagggtgttgtgcgggttggtgacagcctgacgcttggccgactgaccaaccaagatctcgccatcatttgcgtaagcgatgatcgacggcgtggtacgtgcgccttcggcgttttcgataactttggctttgccgttttccatgacggagacgcaggagttggtggtccccaggtcgataccgataattttgcccatgatttactctcccgaaacttgaatttggttgccgcagcagtggtggctaactgcggtagcacttaaacgcttgacttatagatgggggctttacagcgtatttcaagcctgctcatcaatagaaggcgaaaccggtgcaggcgccttgctcaccacgaccatcgccgggcgcagcaggcgaccgttgagctgataccccttctggaacactttcagcacgctgttaggctccaggtcatggctttcctgcatggccatggcttggtgatgctcagcgttgaacggttcgccgccggttggatcgatggcttccagctgataacgcttcagggtgtcctggaacattttcagggtcagctcgatcccttcgcgcatcgggcggatgttttcatcgtccgggttggacaactcgagaccacgctccaggctgtcgatgatcggcagcaagtcactggcgaatttttccagcgcgaacttgtgagccttttctacatcctgctcggcacggcggcggacgttctgcagatcggcggcaacacgcaaagattgatcctgcgcagcagccaattgctcttcgagcacttgcacacgcgttgccagctcatcgccgacagccgaattggcgtctggagtttgcgtatcctgcgtctgttcgtcagccatagttttctcctttcaaaatcatgcacgaactcaactcgcgcttctgttccggtatatggggccacaatttccaggttcaagagcgcaggcgttaccaaaagtctttcccatgatcgggatcaattcctgccgccccattccgcattgcgctaaaaaacacgctcattcaagcaaatcgagctaagcgccaggattgtcagccctgaacaaaacactgtataaataaccagacctaaagcctgggagcgcccgtcatgctcgtgcacctgtccgtacataattacgccatcgttgaacatctggatctcgaactggatcgcgggatgagcgtaatcacaggcgaaaccggcgccggcaagtcgatcatgctcgatgccctgggcctcaccctgggtgatcgcgccgacagcggcgtggtgcgccccggcgcagacaaggccgatatcctggccaccttcgacctggccgatattcccgaggccgaaacctggttgaccgaacgcgaccttaataatgaaggcccgtgcattctgcgccgggttatcacggcggaaggtcgctctcgcggctatatcaacggcacgccctgcccactgggcgacttgaaagccctgggcgagttgcttatcgatatccacagccagcatgagcaccagtcgctgctgaaaaccgacacccatcgccgcctgctcgatgaatatgccggcgccacagaccttgcccgccaggtgcaacttgccgcccagcgctggcgccagacgcggcaggaactggagcgactctccaactccggcgatgaacaacgcgctcgtcatcagttgctcagttatcaactcgaagaactggaaagcctgggcctaggcgagactgaactggagcagcttgagcaggaacacaagaacctcaccaacgctgaaaccttgctgggcatttgtcgccaggtggtagagcaatgcagtgaaagcgactcaggcaacgtgctcaatgcactgactgccagcctcaatcgcttgtcgagcgtgaacaatgcctccggctcgctgagcgaagctacgacactgctcaccagtgcacagattcaggtggaggaagcggtcggtgaattgaatcgctttctggaccacttcgatgccgatcctgcacgcctgcaggaaatagaagagcgcctggacaccatctataccctggcgcgcaagcatcgaatccagcctaccgaagtggcaacgatgcagcaaaagctgctggatgaaatcgagaccctgaatgcgaatgacgaatccatcgaacgactgggcgaagaactcgcctcgttcgctcgtcattaccaggagaaagcgcgcgaactgagcgacctgcgccaacaagccgcgaccggcctggccagcgcagtggaacttgagatccaacgcctgggcatgccgggcgggcgcttcaccattgaactgcgcgccaacgccagcaacgagctgcaaccccacggcctggaacaggtggaactgctggtcagcgccaaccctgggcagccactcaaggcgttggcaaaagtggcatccggcggcgagctttcgcggatcagcctggcgatccaggtgattaccgcgcaaacctcccgggtgccgacgctggtgttcgacgaagttgacgtgggcattggcgggccgacagcagaaattgttggccaactgttgcgacgcctgggggatagaggtcaggtactgacggtcactcacttgccgcaagtggcagcccaagggcatcaacacttgtttgtgcacaaggtacgcggcagtgatgcaacgcacacagccgtatccaagttgaacaagtcggaacgcgtggaagaagtggcgcgcatgctcggcggtattgatttgaccaaggagtcgttggcgcacgcgaagaaaatggtcgtggcggcaaaggcctgagcgaaaaatttccttcttatagaaagcacgaaggcgaccctgaggtcgccttcgatcgttttgcagcgtaaatctgcagcgcttgttactttttcttacggatgtaaaggaccagattatggtcaaccagatcgaagccatgctcttcagcaatcttatgctgcagcgcttcaatctcggggctggtgaactcgataacctcattggtatccaggtcaaccatgtggtcgtgatgaccaccgtcagccaattcgaacactgcatgaccgccgtcgaaattatgacgaaccaccagccctgcggcttcaaactgggtcagcacacggtaaaccgtggccaggccaacgtcctcgttagactccatcagtgccttgtagacatcctcggcactcatgtggcgctgctcagcagaatcgagcatttgtagaatcttgactcgtggcagagtcactttgagaccggctttgcgtagttcgctattttcaaccatggttagctttctcgcggatgctgcttcgcagcttctcttaatacgggtatgatcggcgtttacgttgtcccagccaagatagtggaagtcgcccaccgatgcaaaacaccaagctcttgctaaccagtttcacctttgtgggactgctcgcactcgccggttgttcattccccggggtttacaaaatcgacatccagcagggcaatgtcgtcacgcaggacatgatagaccagttacggcccggaatgacccgacggcaagtacggtttatcatgggcaaccccctgctgaccgacactttccatgccgatcgctgggattatctctacagcctgcagccaggtggcggtgaacgccagcaggagcgcgtcagtgtcatcttcaatggcaatgaccagcttgtcagcctgtccggcgacttcatgcccggcgtaagccgtgatgaagccctgcttggcaaggataacggcaacaacgtgacttcgcctgcgcaggaagctgagaagcccaagtccgaagtaccagccaagcccggctccttgctcgacaagatccagaaagacgtcgacggcgtggaaacagtgcccgtcccgacgcctcagcctctggacaccagcccgcagtaagtttgcggcgctcaacaaaaagcccggcatgccgggctttttgctgtctgccatttgactggcctatgaactctgctgcttagccaaggccgccttggccgcgcgaagccggcgcacttctttcgggtccgccagcaacggccggtaaatctcaatacggtcaccgtcctgcactgggcgcacatcagcatccgtaaccaccctgccgaatatccccaaaggacaatccgccaaatccagctcgggaaattgcactgcaatacccgacgcctgcaccgcagcacgcagctgggtgcccgccggcaccgtcaccgccagcaacacctggcgatcctcggctgcatacaccacttcgatctcaaccatgcagttgcttggcccgctgacaaaatgcatccaccagggtattggccgcctggttgaacaacgggcccagcgtcgcccgcacaataggcccggcgtaatcaaaagaaagatccaggctgattttgcaggccttatccgtcagcgccttgaacacccatacgccatgcagctgggtaaacggcccttcctgcaaattcatttcgatggacttaccgggcaccagcacattacgcgtaacaaaatgctgactaaggccgcccttcgcgacccccacactggcgaccatgtgctcatcactgctttccagcacctcggccgttgagcaccacggcaggaattccgggtaacgcgccacgtcgttgaccaggtcatagagcgcctgtgccggatagggcaacagcgccgaacgttgaatatgcgtcgtcatgtgtgcgttatttccacagctgaggcaaacatcgcgaaaaaacagcccgatccgcgaaagaaaaaatccagagaactgcccgcattgtccgggattcgtccaacacgctcaagcacgcaggttgaccgtagccgacacgctcgcaactccctataatgccgcccctatggctaaacaaaagaaacaccccacagggaccatcgcgcaaaacaaaaaggcgcgacacgattacttcatcgaacatcggttcgaggctggtctggtcctggccggctgggaagtaaagagtctgcgtgccagcaagctgcaactggtcgacagttatgtgctgctcaaggatggcgaggcgtggctgctcggcagtcatatcaccccgctgaccaccgcgagcacccacgtgatcgccgacccggtgcgtacgcgcaagttgctgctcaatgcccgcgaactggaaaagctcgcagccgctgtacagcagaagggttatgcctgcgtctgtctgtcctggtattggagcaagcacctggtcaagtgcgaaatcgcactgggcaagggcaagaaggaatacgacaagcgtgattccgagcgcgaacgtgattccaaccgcgaactgcatcgcgccgtgcgcaacaagggcaaggaagaataatccttgctgcgatgcagccgtgggcgcccaccctcggctacatccccttgcgccgctccgcacgcgccacgcgctgaacttcctgacgcacttcctccagcacttcctgcacatacagcaggtgacgtgttgaaacctcgcgcgcctgctcggcgcgaccttcgataatcgccaggtacaaatcccgatgctgactgatcagcatgtcgcgggtttccgtacgctgttggtacatgccaccaatgttggtcaccacgttacgtttgagcaggtcgaacagaccgcgaatggtgtgcagcaacacggcattatggctggcttcggcgatcgccaagtgaaaccgcgcatcggccgcgccctcctcggcccgactcacctcatcggaccgggtatagcaatcctgtagtgcttcgaaggccgccgtaagtcgctcgcgatcaacctccgtggcgcgcagcgcggcgtaataggcgcaagaggcttcaagggtctggcgaaactccagcagatcacgctgggcctcgggattgttctccagcagatgcagcagcggatcactgaacgtggagcccagggactcagccacataattgcccccgccttggcgactgaccagcaaacctttggccgccaacttctggatcgcctcgcgcaaggaaggccgcgacaccccgaactgctcagccaaagcgcgctcggccggcaaacgctcgcccgacttcagcgtgccctcaaggatcatgccctcaagctgctcgacaatatcgtcagacaaacggcgctgacgcacctgatcaaaccccatcactcactctccaccatcccgaccactcgccagggcctctattctggcctatcgcggcgcttgcggcacctatcagaacgccttcctttcaaccgatcagaacaccctgcacagcgacctacgaccaaagtttcgcaggcggcaaattgacacgcccccagcaaggcttttactctagccaacagcgattgtaaattggtattaccaattacccaagctaaccaaacaacaacaatcaggggccaccccatatgcaaacctggcaacagctctacagcccgctcggcagcctcggcctgtccgcattggcggccgtcattccgatcgtattcttcttcctcgcccttgccgtgtttcgcctcaaaggccacgtagccggcagcatcaccctggcgctgtcgatcctggtggcgatcttcgccttccagatgccggtggacatggcgctggccgctgccggttacggctttgcttacggcctatggcctatcgcgtggatcatcgtcgccgcggtgttcctctacaaactcacggtcaaaagcggccagttcgagatcatccgcagttcggtcctgtcgattaccgacgaccaacgcctgcaagtgctgctgatcggcttctgcttcggtgccttcctggaaggtgcggccggtttcggcgcccccgtggcgatcaccgccgcgttgttggtcggcctgggcttcaacccgctgtacgccgccggcctgtgcctgatcgcaaacaccgctcccgtggcctttggcgccttgggcatcccgatcatcgtggccgggcaagtcactggcatcgacgcgttcaagatcggcgccatgaccggccgccaattgccgctgctgtcgctgttcgtgccgttctggctggtgttcatgatggacggcctgcgcggcgtacgtgaaacctggccggccgcgctggtcgcaggcttgagctttgccatcacccagtacttcacctccaacttcatcggcccggaactgccggacatcacctcggccctggccagcctgatttccctgaccctgtttctgaaagtctggcagcccaagcgcactgcgggcgcacagattgccggcgccacttccagcgctgcggtcactgcgagcgcaggcggtttcggcctgccgcgcaacacgattgtctcgccctacagcctggtgcagattttcaaggcctggtcgccgttcctgattctcaccgtactggtcaccatttggaccctcaagccgttcaaagcaatgttcgccgccggtggctcgatgtacagctgggtgttcaacttcgcgatcccgcacctggatcaaatggtgatcaaggtcgccccgatcgtgaccaaccccaccgctatcccggccgtgttcaagcttgacccgatttccgcgaccggtaccgcgattttcttctccgcgctgatctcgatgctggtacttaaaatcgacatcaagactggtcttaccactttaaaagagaccttctacgaactgcgctggccgatcctttccatcggcatggtgctggccttcgccttcgtcaccaactactccggcatgtcttcgaccatggcgctggtactggccggcaccggtgcggccttcccgttcttctcacctttcctcggctggctgggggttttcctgacaggttccgacacatcgtccaacgccctgttcagctcgctgcaagccaccactgcgcatcagatcggggtgaacgacaccctgctggttgccgcgaataccagcggcggcgtcaccggcaaaatgatctcgcctcaatctatcgccgtggcctgcgccgcaaccggcctggtaggcaaggaatccgacctgttccgcttcaccctcaagcacagcctgttcttcgccaccatcgtcgggctgatcaccctggcccaggcctactggttcaccggtatgctggtgcactgagacctgcacgctatagggtaagaatcgacgccggacaacggttccggcgtcagctatttctggaggaccgatgagcctgcctgctgctttcctgcgcgacgtcgcacaactgatcccgaaagatcggcgcttcgacgacccgctttccaccctcgccttcggcaccgacgccagtttttaccgactgatcccacagctggtaatccgtgtggagtcggaagacgaagtcgtcgcgctgctgcaactggctcagcgcgaccatgttccagtgaccttccgcgccgccggcaccagcctgtccgggcaagccatcagcaactcggtgctgatcgtgctgggggacaattggaacggccgcgagatccgtgggcagggggcacaaatccgcctgcagcccggcgtgatcggcgcccaggccaacgcgtggctggcgccgttcgggcgcaagatcgggccagacccggcatcgatcaacgcctgcaagatcggcggtatcgtcgccaacaacgccagcggcatgtgctgcggcacggcgcagaacacctaccacaccctggccgggatacgcctggtattggcggacggcagccgcctggataccgaagacgcggccagcgtggcagcgtttcgcgaacagcacagcgcgctcctggaacgcttggcgacactcggtcgcgagacccgggcaaacgctgaactggcggcaaagatccgccacaaataccgtctgaaaaataccactgggctgtcactcaatgccttggtggatttcgatgagccgctggatatcctcagccatctgctggtgggctccgagggcacccttgggtttatcagcgcggtcacctacgacactgtgatcgatcaccccaacaaagcgtcggcgttgattgtgttccccgacgtcgaaacctgctgcaatgcagtaactgtcctcaagacccaacccgtttcggccgtcgagctactggaccgtcgcagcatgcgctcggtacagaacaagccgggcatgcccgctttcgtacagcacctatcggaaaatgcctgcgcccttttgatcgagtcgcgtgcagcttcctcgtcgttactgcacgagcaactggcgctgatcatggcctccctggccccgtttccggtggagaagcaagtcgacttcaccgaagaccctgtggaaaacgcccgcctatgggcgatccgcaaggacaccttccctgccgtcggcgccgtgcgcaaaaccggcaccacggtgatcatcgaggacgtgaccttcccggttgaacaactggcaatcggcgtgaatcgcttgatcgagttgttcgacaaacaccactacgacgaagcgatacttttcggacacgcgctggaaggcaatctgcacttcgtgttcacccaaggcttcaacagcgcggaagaagtcgcacgctaccaagcgttcatggacgacgtggcacaactggtggccgtggagttcggcggttcgttgaaagccgaacacggcaccggccgcaatatggcaccgtttgtcgagctggaatggggcagcgacgcctatcaactgatgtggcaactcaagcgcctgctcgaccccaacggcattctcaacccggacgtggtgctcagcgaagacccgcaaatccacctcaagcacctcaagccactgcccgccgccgacgagcttgtggataagtgcatcgaatgcggcttctgcgaaccggtgtgcccgtcgaaaggcctgacgttgagcccgcgccaacgcatcgttatctggcgcgatatccaagcgaagaaacgcgccggtatcgacacctctgagctggaagccgtctatcagtaccacggcatcgacacctgcgccgcgaccgggctttgcgcccagcgctgccctgtgggaatcaataccggcgacctggtgaaaaaactgcgcagccgtgacgccgaccgcacgaaaaccgccgaatggctcgccacgcatttcgccaccgcgctgcaaggcgcgcgttttaccctgcatgtggccaatggagcgcgcatgctgctgggcgcgccgcgcctggcaaagctatcggccagcgtgaccaagctgtccaaggggcagattccgcagtggaccaacgccatgccgcagccggaaaaagccattcgcttcagcccggcggtgacggacgagcggccacgggtggtctacctggcggcctgcgtctcacgcgccatgggcccggcggcgggcgataaagagcagatgtcgctgtacgacaaaacccgcaagctgttggaaaaggccggataccaagtcgtgtttcccgacaaccaggacaacctctgctgcggccagccgttcgcctccaaaggttacgccgaacaggccgagcacaagcgccaggaactgatcggcgcactgctccacgccagtcgtggcggactcgacccgatctactgcgacaccagcccctgcaccctgcgcctggtgcaggacctgggcgaaacgcgcctggatctttacgaccctgtgcgatttatccgcacccacctgatggatcgcctcgacttcacgccccaggaagcgccgatcgccgtgcacgtcacctgcagcacccaacacctgggcgagagccaggccctgatcgacctcgctcgccgctgctccaacaccgtggtgatcccggaaggcattcattgctgcggatttgccggcgacaagggcttcaccacgccggaactcaactcccactcactgcgcagcctcaaggatgcggtgcaacattgcagtgaaggcatctccaccagccgcacctgcgagatcggcctgagccagcatggcggcatcgattatcacgggttggtctacctggtggaccgcgtcacccaggcccgcgctcactgatcctgcaaaaaaaacagaacccctgcgcgccggcgtagtcatctgcataggcctcgccaagcgaggtttatcagtgatgtcgctggcagcggttgaacgccagcagcgtcgagcccttttgcgcaaggagatacccgatgaagcgttccgctcttgctggcttgttcattaccgctgcgatgctggcttcccctgtattcgcggcgggcgagcccgatctgtgcaaaatcaatctggacaaaatcaacaacggtaaagccctgctcgccaccgacaccagcggtaaaagcggcgagatagacactgccgtctcccaggccaaggcggcccacgccgcgggtgatgacaaaaaatgcatcgagatcacctcgaaggcgctgcaagacctgcagaacagcgaaaaaggcggccaataggttgctcagtcacggaaggccaaccttcgggttggccttccgtgagcgtttggcgtacactgcataggcttgtcactcactaagaaacaacgagttacaagcacggggccgtttaggattcgacgccggtcgcgaaactttaggtgcatgccgagttggtaacagaactcgtaaatccactgttgcaacttcttatagttgccaatgacgaaaactacggccaggaattcgctctcgctgcgtaagcagccttagccctgagcttctggtaccttcgggtccagcaatcaccaggggatgtctgtaaacccaaagtgattgtcatatagaacagaatcgccgtgcagtacgttgtggacgaagcggctaaaacttacacaactcgcccaaagcaccctgcccttcgggtcgctgagggttaacttaatagaaacggctacgcatgtagtaccgacagcggagtactggcggacgggggttcaaatccccccggctccaccatttgatcatctaaagacgtccacggacgtctttttttgcgcctgaaatccagtaaatactgggctttcagcgccatcagcgtccacggacgtccaagagcagccacgctgtatggcattccaaatggcattccaagcccaacagtgctaatttttggaatgccaaccccatcctggaatgccaatgtgcgcacaagctactcgcctctctgagctcaaaatcaaatctgctaagccctctgagaaggactacgtcctgtttgacggcggcggacttcaaatgcgagtgagaagtaatggctctaagctatggaacttcaactatcgacaccccgtgacgaagaagcggatcaacatgggcctaggtactttccctgaagtttcgttagcgcaggcacgaaaggggtctattgcagcgagggaaatacttgcccaaggcctcgaccccaaagaacaacgagatgccgtgctgcaagcaaagcaagctgaaactgagcatacattccagaatgtcgcgacgtcctggtatgaactgaagaaggatgcggtgacaccagcttatgccgaggacatctggcgttcgttgacgctgcacgtttttccagacttggccaccacacagatttcagccatcagcgcaccacaagtcatcaaccttcttcgaccactcgaaaccaaaggtagccttgaaaccgttaaacggctgtcacagcgactcaacgagatcatgacttacggggtcaactcaggattgatacacgcaaacccactcagcgggattcgctccgtcttcaagaagccgagaaagaaaaacatggcggcacttgctccagatgagctgaaagagctcatggtggcaattgccaatgccagcataaaaagaactacgcgctgtctgatcgaatggcagctcaataccatgactcgaccagcggaggctgcaaccacgcgctgggccgacatcgacttcgagaagaggatctggacgattcctgctgagcgcatgaagaaacgccgcatacatatcgtgccgctcacagatcaatcactggcactgttggaggcaatcaaaccatacagcgggcaccgagagtatgtatttcctgcagaccgagaccctcgaacacactgcaacagccagaccgccaacatggcgctaaagcgcatgggcttcgaaggtcgattggtgagccacggcatgcgctcaatggccagcactattcttaacgaacacggctgggatcctgaattgatcgaggttgcgcttgcccacgtagataaagacgaggtccgcagcgcctataaccgagccgactatatagagcgcagacgtccaatgatggcctggtggagcgagcacattcaagaagccgctaccggaaatctttcggtagcggctatcaaacagtgtacggacaaaaaagtcattccaatacgttaagcagatagaaaacataggcgagcgtcaccaaaccgaggcggctgaaccgctctcagctcctctgtaaacgtaaaggcattgatggctcactggcccgagttttgtacagatgtcaattgatgcgaattagccagattggtgcaagtttatgcaaaaaccaaaatatcaaaactaatctttataaataataggcataaatgaatttctacatctcatcacactccaacccactggccaagcaagaccaaagctatgcctactatgaccaaaatgagtaagttatccgtgagagaaccagagatccaaaaagccttgcttcaagtacttattcaagaagagaatccagatgcgctagcgattgagtttccgtttgacttcggccgtagaagggctgatgcaatatgcattgccaacaaccagctttctggctacgaaataaaatcaatattcgacagggtagatagactgcccgaccagatcgagtcgtataaaaagctatttgattttgtatatgtagtatgcgacaaacaccactatagaaaaataaacaaacttataagcagaaatacaggaatatacatatttaatgatggaattatcactaaaaaacgctcagcaaagaacattcgaaacactgacataatgacaaccctagatgcaattccaatgcaacaattgaggactgacttcaagctaaacgccaactccaaactagagctttgcaaaaaaataaaagattcccactctcgcgaattaataagagaaaaaataaaaaattacataaccaataaatacgccccgcaaactacgacattccggagcgaggcaagccaagtattaacattagacgacatattgtcgctaaccctaaacccgcagaaactaacgccctaatacctccactctccgataaatataattattcacccttacggatatccaaaatgaaggactaataccagaagggctaccagccgaagcacttcgtatttcctcatcaccccacgtaaaaccattagaaaacctcacatcagcaacaactttcttcgcacacttaacatatgaacccttatcccttctataacgataatagtaaaataccccatcatcacagaaatcaatccttggaacaaaagtgccgcctcgcatttccgtctgatttatatttacagatgcataatccccaaacttaacaagatcatcctgctcattcagagcgagaaataggccatgctcgtaaatatcaaaactcccctcttcatccccaccaccctctttagaaacaaactgtggaaatgagcctgcaataacaactacactctctaaccaatcggtatcttcgccgatatcaagaactatatttttagccgactcaaagagctctacgactgtttctagagaatcctcttttacagcggccctaatacaaccctcatcaagcaaaacgtaaagctttgcttcgccaagctcatctagaattggctcaatcacttcagagtattcatcttcctcaagggaggccggtagacgtaaagccaaccgagggaatgcaaccgacataatactgacaaacttgagtgcgtttacgagcccaggatcctcatcgaaatcgatatgtatggtcggtacaatatttaactccgcgtaggatgtgagcatgtccctccaattcttatatccaccatcaggaacaagaacactttctatctgagagttcatctgcttaggatctgttgacacatcaagaataaatggcctctttccttgaatgagtgcaatctgatcaagccttttagacacatcaccgactggattatttttggatgttcttgactttgtaagctcatagacgggaagtatcttatctaacaccaaatcatccacgcatgatatagctctaagctcagcatcttttgtctttaacactggaaaataaacaaagctactccaatccatgccccttcatccctagcattttggctctaactcttacagcaagagttgaaactttaaaatgttttccaagctcttcaatactgccatcgaaaagcttgacgtattttctgaacacctcttccggcatcagaagctccccagcaaacctgttagcttccgactccattggactgctgtcaccattgcggaagaagttttgatctacaaactcagcttgcccacctctatgtcgcgaaaaatgtccaagctcgtgtgcgattgtaaatctttgtctattcggatgatgcagcgcattaactttcatcacccaatccttcccattaggcgcgcgacgcaactctccagacacttcatcattcataggtacgcaaaggaactgtattcctaagacacggacgagcgcatgcacatcaagcggcacagcttccacgccgttacgctttgctatttctagcaattgcgcaacggtcaaaagctcagccccgtcatttgtacgaggcgcgctaacggtttgagcggtttttggccttgaatttttacggacaaaagccatattctcgcctactcagtaatttttccatcttcatcagcatcatctgttctatccaacatagctacacgctggctaatagtcattatagcaccatcgattgtttttagcctgcttgaaacgccttctatctgatcaaataaatcgccataagtagagttaattttcgagatctctttcttggcctttcttttcaccagatctgtaaactcaccacttcttgaaaattgctcaaactgttctacagcctctttaattgcttctgctttcgaagaagctctaataataaaaaacgctattgcaaggattgctgcatttaaagcaattaaaacactaacaatagtttgataaaaagaaacctgcattgaccaaagagcatcaactgttatcaacgtcttttctttaaccatccttgaaatcaatatctgctcataataatcaaggtctttaatttcacgcagagggacatactgcccatgagtcaacaaaatttttgttagcggagaaaagtgaataatcgccaatgcaaaaacgagactaagcgcagtagaaaaaagagttgcaacaataaacccttttatgtcatggcgacccatatttactattatccttatataaacggcttacagagaggttcctattcaccctcggccagacgcaaaactactcgccatcctcatgctacaccgccttccaaccagaagtctcgaccaattatgccgctcgcgagtcacctaaatgtcagttgactgatggatatgaggctaccaagaaaaggttttggacctatcggtaggaaacgctcacgcgccctcccctccgctctctgaaacggctagttccattgaagaaaatttcagtcctacataacagcgatgacaccactaccacgaaggttcgccctatgtcattgcagtgccctcgctgtcactccccaaaagtcgcttcattccatcacgccatgaaaatcggcgcgaccatcggcaccgttggcggtgctgcgcgtggcatcagtactgcgctggctggcgttcaggctggtgcgtttattggcgctattgctggacctgtcggtatcacacttggctccgtatcgggtgccatcctcggtggcctcgccggcggggttggtggttgtgcgctcggcgcccaactcggtgagtcgctcgatcgccacgtcctggcccacaatctctgcctgctatgtggtcaccgctttaacctaccgacctaatccggtcaatctctcttctatctattacgtccgtttcggtgctgcgttgtacgcggcgctttatgacggatagcatccaaaggaatcacaaccatggctcatctcgtcgaaactatggcctacgccggagcaactccttggcacggccttggcaatcacctcactcaaaagcaacccatcgaagtttggcaacgcgaagccggcatggactgggcgatccaggaaagccccgtcctcttcaaatcagagaccatcggccacctgggcgcgatccattccttccccgaacagaaggtgctgttccgctcggataccaaggcgccgctgtcagtcgtttcccagcgctaccacaccgtgcagcctcgagaagtcttggagttttatcgtgacctcaccgaggtctccggctacgagctggaaacggccggtgtactcaagggtggtcgcaagttctgggcgctggcgcgcaccggacaaagctctaccctgaagggtaacgaccaggtcaacggctacctgctgctggccacgtcctgcgacggcaccctggccaccacggcaacacccaccaccgtacgtgtggtatgcaacaacaccctgacgatagccctggacggctcatctcgcgcaatcaaggtgccgcacaacacgcgtttcgatccaaagacggtgaagaagcagctcggcattgccgtctcgcaatgggacgattttatgtaccgcatgcgtgcgctggccgaacgcaaagtgcagtggcatgaagcgctgggcttcttcatgagcgtgctgtgcgagaccaatccgaccggcgtactgccggaggtactgcccaacgaacgcgccctgcgaaaggttcaggagctgtacgaaggtcgcggccgaggcagtcagctggactcggctcgcggtaccgcctggggcctgcttaacgccgtaaccgagtacgtcgaccacgaacgtcgcgcccgtagcaacgagtaccgcatggactcggcatggtttggccaaggagcgcagatcaagcaacgtgctctggacaccgccctgcaacttgtcgtctaaccggttacttcctcccctccccaaaacgcccgatcagcctcgttgctgatcgggcgtttctatttctgcaaggtgaacgctatgaacgctactccgttgcgcagcactagcaaggctcgtccagcgctgcgcctgatcagcaccaaggaactgcctcgtgaagattggctggcggtgcgcaagcaaggcatcggcagctcggatgccggcgctgcggtgggtctaaatccctacaaatcgcagttggagctgtggctggagaaaaccggtcgagacaccacactgccaaaagccgacccacatgatgaagaaagtccgatgtactggggcaacgtgctggaaccaatcgtggcctggcactacagcaagcgtactaaaaacaaggtgagacggatcaacgccgtactgcagcatccgaatccggatatgtcctggatgctagccaacatcgaccgtgaggtgatcagcgcggacgaggtgcagatcctcgaatgtaagaccgccggcataaacggggcacgtctctggaaggaaggcgtacccgagtatgtaaaactgcaagtgatgcaccaacttgcagtcaccggcaagcaggcggcagatgtggcggtgctgctcggcggtcagcacttggagatccatcgcattgagcgagatgagcagatgatcgcccgcctgatcgaactggagcgtaagttctggacctacgtggaaaccgataccccgccgccagccgacggcagtgcatcggccgaggcggctttgcgctgcttgtacccggaggacaacggtcagaccgtcgacttcagcggccatgcaggattgtcggaggcctacttagagctcaaggccgtgcgccaatccatcggcgagaaacaaacgcgcgaggcccaacttaagcagatgctgcagcaagccatcggcgaggccacccgagcggagttctccagcggatatatcagctggaagaaatccaagggctgcaccgtgctcgatgtcgaacgcctactgaaagagaaaccttacctgcaggttcgctacgccaaaacccaggaaggcagtcgccgcttcctgatcaactgactccgctattccttacttccctccccttggccagtccacgcagttagcgctgcgtagctggccttttttcattttcaggagaaccatcatgttgaaaggcttagccctaacgccgcccgtgctcggacgcatctccatcggcaaagtcattgaaagaaacggtaaacgcctgccggagaaagatgatcagttcaccatcacatcccaggtacaaagcagggatggctggctgctacatccactcaacgacgaactgcgccagagtaaggaagacaagctgcgcagtattcctatacgcctattgttcaacgaaccggagctgaatttccgggctgattacaccctgttcgaccggcagtccgggcgaccgttatgcgtgggcaatggtgaaacctgcaagcgcgctgcccaggacggcatacagtctctgccctgcccttcgcccgatgcctgcccactagccaaaggcggtgcctgcaagccttacggccgactgaatgtgattatcggtgatgaggattcgttgggtagctttgtgttccgcactaccggattcaatagcatccgcaccctggccgctcgactgcattacttccaggccatctcaggtaatcgactggcttgcctgcctctggagctgcgtctacgcggtaaatccacccggcaaagccatggcacgccgatcttctatgtcgacctcaccatacgcgctggcatggatatgagcgaagcgctgcagaaggcgagcgagctggatacacagcggcaaacagcaggtttcgatcagagggctctagatgacgcagctcgccgaggctttggcaacggcgccttcgaggacagcgaggaggacagtcacgtcgtgatcgaggagttcttcgtaaactcggagcccgccagcacctctagccagggtgaatcgcagtcagctcccaactccctcgcggcaaaactagaagccctcacgtcgcaggcccactgaatcaaacctgtcggtgccgtgtacatcggccagatacaagatcttggagtccagccatgtcgctaatgcgatttttgctctgcttgttcatattcgtcggcgcgcttgcagccgccggggcgctggtgctgagcattctgctcatgctgcgctttccagcgctgttactggccgttctgctggcctgctggatcctgagtcgcttgctcagactaatttccccaagtcggggaaatcccacctgaaatattccaagtaaccgtcagcggccatgcacacggccgcttttaccaggagaatgaatcatgtttcgatactgcttgatctgcgactccaaggccgtcctaaccagggaggcagccaaaggcatcgccatgttactcggcctgctgacagcgcgctgcgggaagcgcagaaatctaatgagaatacccaagcgccaggcagccatctgctcatcaatggattagccgctatcacttccgcgtatccaccggcgttgcgggtagccgaggatgtcgctaaatatcacttcgcggggttcaactgtttgtgcctacgctgtggtgctctgttcgacgagcctggggaaaaggaatcctctaaaacaacaaagcaaccgccgtgactgagccaatcagttgcgatcaagcctagtaacaagacgctccaccatgtccatgacgaagtcgcggtcatacgcctccagcctagacagcaagtcatagagcctgcgcgcctggtcctctgggcgtgaactcccctcggtcagcaggtcagccgtttcacaacgaaaaaccgctgccagctccgccaaacgctcgatgttgggcataacgatccctcgctcgatacgggatacggcctcgcttccaatgccaagcctttccgcaacctgctcctgactcaacttgcaacgagcacgctggcgagcaattgcttggccaacaagctcagccagctgcttcgatttggtttttgacatgcagccctccagttcaacctgaatggttggctatcaacccgttgacatgaaggacttactgggtcgagactcacccttaaaggttgtaattcaaccctttctcaaaaccactatctcttgcagggagctcagaaaacccatgatcgtcgtaacagatctgaatgaagcgcagattgaaggtctcgtgaaaaataaagcgtccttcgagatccatggcctcaggggtaatttcatggcaggtatcaaactggttgaaaccaagattgaaagccaggggctgaagtgtcgagtcaaaagcgatgtgaaaagtgcagtggtacaaggcggcgcactcggcgccatattcaccgttctgacaacacctgcaacattgaccatagcgacattaacggcggcagcaggcgtaggtcatacgctcgttacgtacaaccccgactacgaaatcatcaaggactacgtcaacaagcggctcaaggttgtttacaagaaatagcagctttgctcagccccctcgtcaaacccttcaagtaagaaataaaccatgaaacatatcctctgcattcttcttctcgcgtcctgtgctcaagccaacgccgaaatctccgcataccaaggttcagcggctttctttcccgacgaaaaatcgaaccacaaccttccggaagcgattccatgcgtcacccgcccagcagcgacgggtcaaccgatgctcttttgtacttggctcaccagcacgcgctacgtggatatctgggacgctcagcgccagcaaaacgtccgtatcaccaacaaggtcaatggcatgtgtcagcgtggcaactgccgaatccaaggtgcagaggtaggccactggaaggagaacaccccattccaactctccatctggtatcggataggcagtagcaccgatggcaaaccagttgcctaccgcaccgacgcgactcggcaagtatcgtacgttgaagctggcagtctattgatgaagttctacctggatgcaggtgtcccagagaatgaactggcttcaaccttcgacaagcgttacaccggcggttgggcagcgtggaatcaggagaaaggcgggaatgcatcaaaagcgacgaacaccccggctgctcctcagtccgaatggccagaagtcaaagccgcctggtgcaatccgcgcatggatgatgactgttacatcaacagcaaaaaagtccctattgccgagctgggcaaatggttaccggacattagcgaatcgaatgccgaccagctaggaggtcactgcgagaccatcctctgcttcgataaagatgaccaaccgatgggctatcttttgcaatgaggattcgagcaccgctggccaggctaagacattcgccttgctaatcctgaaagcagggggcgtaagccccctattagcttcacttcagttttatttttggcgaagttaatattcgcctcgcccaaccagacgactgcattttaatgcagccaggctcgtaagcagccagccatcgacgctggcagaagccgataacggcttttgccaaattcccctattacctatgtaatgtccgcgactacagcaacgccctaaagtgacgtttgtccgcgtccgaggacttgaggatgcggtattccatgccgctagccacagcgatctgctgggcaaagtccttcttggcttgcaccacggcgtcctcaacctggtagtcggccttaacctcaacgatcacgtacttcaggctgccgtccggctcttcgcgctcgaaaatgaagtcggggtagtagctgcgtacggtgcgcgaatctggatcgatgtactggataaagaagtcagactgcccgtgtgtcagcattccagtgaagtagattttcttcacccgctgctcacgcagcagatcccagaacaaccagttttccgagcccgaatcaaagcagtaagtgtcgaggtggaagctcttcgcgcgctccgcatcgctaatttttggatcgtcacgccggacgatcttgtccttagcggctgtgacctcgtagtagccgctgaccggcaccttaatcagatcgatctcccgttcctcagtttgctgcgtctcatctagatcgtaaagctgacgaaataggcgcgggatgatttcgtcgtaaagaagctcgttgaaatggtttgtgatatccaccaattcttcggtgccttctttggtcgaatccagcagctcctcgatttccaacgggctgcgattgagatagcgcgacacctcagcaaccagagtcatgcgcgagaaagtgcgcttctcacggcgcaccgtcaggtcgaaggtacggctgccagacgcacgagccgcatcggcggcagtcaaaccatcctgctgtgtctcgatcaaccggtacttctcaaccaatgtgctccagctttccttatcggcacgatcaagtcccaatgcttgaccgggcgttaactccttctcgctcacctgaaattgctttcgaacgcgcactagcttgatcttgaccggcggctcagtcacgcgcactactacgcgctccttatcgcttcctgtcttttgaagctcatcggcgctgattcggaagttctgctgcagctcatcattgaggatgttcaggttttcttcagataagaagacgtgcccggtgtgctgagcctcgccgatggagcgcaggcagcgcatcgtggcttgcaacacgaacaccttcgactttggggcacggaacaaaccaacgccgaacagagagcgacagttccagccctcgcggcccttgttaaccagcaggatgaactgcttctccgagctttcagtatcgagccggttgaactcgcgaatgtcgtcgttggtagtaagcttgttgtcgccgacgttgaccaagatgcgcgaagtcggaataccgtgcttgagcagcgcgcgctcgaccgccggtttcagttcgctagtcaactcatcaacggtggcggcgaagaaggccagcttgggcaatagaccctctgggcgaagatcgcccgattccctcaggaaagcctcaattgcgatgcccacaaactcgtcggtgcgggtgttggcatagccgtgcagcatcaccttcttgaggtaggccttgtcaacggcctctttcaggccgtaggcataaaccacctccggcagtacttcacgcccgacgtagggcgtaccggtgtagttgtagcaagccaccactcgggtgcctgctgcattaaggctggcagctaggatgtcaatggtggtgcgtaggctggtatcggtttccttagtgccgacacccatgtccttggccagcgccctaccgaaggcgtgatgcgcctcgtctacgtagatgcccaactgctctaggcggcgtaatttctcgaaacgctggttggtggtcagctcgccttcttcctcgggctggtcgaagttgtagaggtcagcggcgtcggcgtagacaccagtcgcagttagtgtttcaccggtcgcaccgaacagcttatcgacagagttcttttccttgtgcttgcgcttaaggatgatcttctgtgtattggagacaattatgttgaagcgcgaccgatccaacgtatcgagcgacgtaccagcctcttcgaggtagtggaaacgcaaatgcgtggtcaggaagtttacatattccggcggcacgacgcgggtcagatcgaaggactcgatctctttcaacgattgcagtacggtcttgtccggcgcaaacaccagcgcgttgtgacagtagcgcgcgtctttctcaaacttattgcccaacaggaactcataaaaaatacaggtcgccatcaaaatggttttaccggtacccatcgtcagcgcgaagatgtagttcggataaacacgtgagtttttccgcatcgcagtgaacacggccttgtactgatcctgcgtgatcttgtcgaacaagcccacttgcccagcattaccggacgctacaccgccttccgtacgatctgcgaaacggccctgcttctggaaccactgttgaaatacttcctcaaccttagcgttgccaaggaactccttaaggaaaacgtaggtttccagcgcctcgaactgtggttgccgtagaaaggccttggggttcttttccggattgttgaagtcgaggaacttacgggtgagctccttatagttctggcggatcacgcctcgattggactggtagaactgccagagaaactgaaagaaggcgaagtctagcgacgcactcactgccttagctgcgcgcttagtcgccatggctaatgctcccttcccaggactccgacagcaggtcagtgatcttcacgcgaatggtgcctgcgtcgtccggtaccttgtaagcgcccgtaacaaactcgttttttcctggaatgtccaccaccgccggttggagtaccgcaccgtcgtagttccagtcgatcaacacgctttctgccagctccttccaatcctggatcgactccttttggagcgagagcttttgcagcaaattcatcggatagaacctctcgatgatcaggtcatcgtccttaatggataccttagcctgcgaatcgcgcttgaattccagatccgccttgtcgcgtaagatgtcgaccacttccacatctatcttgaaaggtttggcagccaattccagttgggcggctaagtcgggctcatggcccatgcagacaagggttattttctcagccggtcgattcgggctttcattctgcttgcgctcccacgctttgtaatcgaagcctgcaatcaattcgttcagatccgcgcgcgtggcgatgcggttgacgggcatgatcttgatcatgcgtccgtccttctcgccatcaaatacagaactaaactccagcttctgcacttccagcgcctccaacagtagctctttggcttggaccgggttgcggaagatgtcatagtggtttacgttaaatatttcaaatccagctctgctagtttgatcagaggcaatacgaatcagcctttgtgttgttgtctgaattgcaccgaggtttatatctgcaccaataaatcgacgcccggctttcgtagccgctgcctgtgttgttcctgaccccatgaatacatctaacactaaaccatttgcaggacagccagtttctataattctccgcagtagtgtttctggcttttgggttggatagttttctcgctcttgcgcttgagagttaacgggctgaatgtcgtcccagatcgtggttagtggctgcccttcaagctcgtcaaagtaacgcttgtacctagcaactcctgaggaggtatatgcgagcaagccttcatcatgaagggcttgcattttttccttggtgactcgccaaactcgggttaccccgttccattcatactgcaaatttggtcgatcagggtttgggttattcatgttgtcgagtgtgtattttcgaccatcaccatcatcctgattaaaccgtgcaacatattcttccgaatatttaattctaggcggcgtccaacttgtattcgtgcctctggcatagcaataaatcgtatcatgagctgtgctgagacccatcttcacgtttcctcttgcagcagctcgcttccagataacttcggaaacaaagcgatcaggcccaaaaacctcatctagcaagcatcgaagttggtggctcttatggacatcgcaatgtaaccaaatagttcctgactctgtcagcagctcgcgcaagataatcaggcgttcatacatgtattgcagatagtcatcattcagccaaatatcgcgatattgcttttcttcaaatgcagataccccggagtccacccgctttcctttaagggaaatagtcttgttgtaatcgactcgggaatcaaaaggggggtcgatgtaaatcaggtctaccctccccctgaactgctttagcaaatgactcattacctgaaggttgtctccccagaaaatcttgttgcgccacccgtcgacctcttcgccgtggacttccttcaactgagcagggtaatactgcgtcgaagtaaacgggcgcttaccacgccagttaagcatcggatagcccttgattggctcgaattggtacttctcgacgttggtggcgtcgccatcaggcgtggccagctgcaagctttcctgcgctggggtaatagttttggtcatttgtcgttgttcctgaatttccaattcttgttgtcgcagtaagcgcgcatgtcacagttctggcacagcttggcagggcgcgcagcgattcggtagtcctgctgctctatgcgcgccacgatgtcgtcgaactgcgcgatcgtcttgccaatggagcgctcgtctttgctgaaagacacgtaggggttacctccgtcctcacccgtataatacaggtgcatccgactgaccttttggccggtacgctcctcgaccagatgggcataaacctccagctggttctggtattgccggagtcggctgcgatccttctccatgtcgggttttttctccgacttgaagtcgatgatctcgactgtgtcatgttcgccccgaatgaggtcaacgctgcctttgaggatgtaatgatccttgaccagcgaaatctcgacctcggcctccttgatgcgatcccagttgccgttctcgcgctcgaagtagcgcatcacgtgaagcagtgccgcctgctgcgagctgggggcaaggtatacgcgctccttcttggaaatctgggtgtaatttgccgagaaccaagatgcgatgagctctttagataaggtacattcctcaccgcgcagaactgttttgtgaatatcttcgatggtttgatgcacaagtgtaccgaacagcatggggctttcgcggatcggcgcgaactctaaatccttgaagaagcggtactgctcggcgcagttttcgaacacggtgatgtgcgaagtgaacgaatactcgcgcttgaggttaatctgcttaaccgcttcgtaactgaggctcgcgagatcaacgtcgcgccagctcggcaggtcgtagaacagtcgttcgaagtatttggatggcgatttaccacgcccctgtttctcttgcgcagctagcaccaacagattctgcgcacgggaaaaagcggtatagaacagtcgccagaagtcgaattttttgatgtggtcgagcggttcgaagcgctccttcgagaggtagcccccgtcttctagcaactcgtcgagtgcgctgtattgcttccttggtaccgcctccagcgacccgcagaccacgactgggaactcaagccctttggactggtgaatggtgaggaaagacacacagcccttgggcgcatactctgcctcatcttcatactcaccaatgccgccatccaccagaaagcgcaaaaactggttgaagagatcacgaatgttcttctctagccactctgggttgagcacgctgacgaaatgtaggtactcgaacttagtgagcagcttggaaaaagtgccgaggttgcgcgccgcacggcccttgtccacaccttgcactgcgtcctcggaaaggaagcgcgcgaatagcgggaactgaagcaactgataaaataggccggagaaggagtagtcggtgttctgagtcaatacggcgtgacgcttagccagcggtcgagcccaatccaacagagacttattctccggctttcgcagttccgtggtaaaggccgcgaaacactgccggtcgtagtagtcccagatcggtagcgtgacaccttcgacccacgcccgcaccttggggaactgcggaaacaggaagatcaacgcgccgatcattaggcgaacttcttcgcgcgcgaaaaacatgttcgagcgaggtgagaacacgggcaccccttcggtttcgaggaaacgcgccagcgcgaccgccttctcgctcttcaccgagcggaatagaaaggcgacctgattccagtccgtcagcttgcctgtagccttcatggtgttgaggaaggtcagcatctcggcatgccaatttttggattcgtcattactgtcggcggcagcaagtcgtaccaccgtagggacgtctgggaagtcaccctcacgcgggacaatctgcttggcgaagcggaacacacgcgtgccatcgtcccacgtctgctcgcgcatccattcgttgtaaaagcggatgatgtctggatgcgagcgataattgacggtgagcgccacctgcttgcactgtccctcatcgaagagcgatgggaattccaggatgttgcggatggtggccccacgaaagcggtacaagccctggtcatcatcgcccacaacgcacagattgcgcttctcgcccgccagcaacaggagaattcgctcctgaatggtgttggtgtcctggtactcgtccaccatcaggtaagtcagtttctcgcgcaattgcgccatcacctcggggtgcttttccagcagttgcagcgcctcgaactggataccagagaaatcgagagagttattttcgtgcaacagttcttgatacttgacaaagcaggcggccagcgcacggacctccacttcgggagccgccgccagcatagcgaggtcgagagcttcctcgccgaccttgttgagccacttgagcaagttctctgactgtgcccagcggcccgactggtcacctcccataatgagctgagcatcaggcagctcacgaaaatccttgatgcgctggtagaggaagtattgctgatcgaactgatcgaacagcgtaaagctgcgtttgagtcgtgtgaactcgcggaagtcttccaagatgcgcagacagatcgaatggaaggtgccgaggtacatctcattcaggttgaaacggatgcccagttctgcgagccggttcgagattcgggtggtcagctcgcgcgcagctttatccgtgaaggtcactacgagcagcgactctggtgacacccccttgtgcgtaatcagatagacaatacgctcgaccagcgtgaacgtcttcccagagcctgggcccgcaataataagcaccgggccgtcggtggacaggattgcttcaagctgctgtgggtttgctttactttgaagaggggttacaccagaggtcattccgtatcctcgttatctgccgcacatctgacgatgcgacgttctatccttcgagtcaggtctccacgacggaggcgcctggtaccacccagattcaagcctgacagatcaccgttcgctgcaagatgataaatcgtgcgtttgcttgccttaagttagttaggcagcagcctcatcgatagttagattctcgtctggttgggcgctcatctggtcacctaccaagctcaatggctggaatggtctattcgtgcatctcgtcatcaggtgtcacaattggccaaacctggtcaagtatggcatcaatctcgatactttaacgccgcattgagggaactttatggcgtccaactacgaagcgatctgtgaagaaaaccagcggcgctatggtaccgaaggcgctcagaaatccggagagctggccgctggactgtatgacgaccgcacgcacttcatcttcgaactactacaaaacagcgaggatgctatcggtcggcgcggtaattggcacggaccacgcaaggtcacgtttattctgaccccgacaagcctgacgctatcccacttcggcaaacccttcgatgaagcagacgtccgaagcgtatgtgacatcgcagagagcacaaagaacgagttctcaattggccgcttcggcctcggtttcaagtcggtctacaccgttaccgatctcccggagatacattctggcgatgaggacttcgccattgctggttatgtattcccgaaacggacggctcgcacggcacgtgaagcgaacgaaacacaaatcatcctgccccttaaaactgaggacacggccgcgccgcaggaaatcacagctgggttccgaaacctgggacctagcgcgctgcttttcttgcgacatatcgatgaaatcaactggagtgtcgatggtggcgcttccgggttctatttgcgaaacagcccggaattgctcggacacaacgtccagcgcatcacggtaataggccaagaaagcggccaacccgaagtcgatcagaactggctggtgttccaccgcgacgtattctccgccgaacagcagaaggtcgggcgggtggaaatcgcctttacgttagtctcggaaaaaaccgactccgaacgcttcggcgtgcaaccactgaccacttcgccactggtggtgtacttcccgactgtcgttgagacccacctaggttttcttgtgcaggggccgtatcgcaccacgcccagccgcgacaacattccgccctctgaaccgtggaaccaacatctggtcaaggaaaccgccaacttgttattggaggcgacgcgctggatgcgcgacatggcgatgctagatgtctctgcgctgagctgcctgccattcgaccgcgagaagtttccgcaaggatcacggttcgcacctatgttcgatgccgttcggcagtcatttcagaatgaggctctgctactcactttcgatggcaaatacgttaccggcaatcaggcaaagctagcgcgcacgcaagagcttcgagagctgttcagtccagaacagctcgcactactgtttggctcggaaatcgccatttggctgactggcgacattacccaggataaagcaccggcgattcttcagtacctaactcgtgagctcgacgtcgatctgattacaccgacaaaactaataccaaacctgactaagccattccttgaggcgcagcccgacgaatgggtgatgcgcctgtatgagtttctgggcggccaggaagcagccttgcgccgccgcctagacactattccacttatccgccttgaggatggtacccacgtcattgcccaagagaatggcgaggtgaaggccttcctgcccagcaccatcacaaccggctttccgacagtacgtcgtgctgtatgcgcttcgccagaagcacgcgctttcctgagttcgctgaagattacggaacccgatccggtggatgacgtaatccgaaacgtcttgccaaagtacaggcaggacgaagttaatgtggacgataatgcttacgctaccgacatagaacgcatccgctcggccttcagcacagactcggcgacacagcgagagaagctccgttccgccctgcgcgagaccactttcgtgatggcggtcgacactggcgacggcaaaggctacgtcagcaagcccagcgacatttacatcgccacggatcgactgaaacagctatttacaggcgtttcaggtgtcctaatcgttgacgatgaatacgaatgcctgcgcggcgaggatacacgggatctgctcgtggcgtgcggcgcaagccgttatctcagtccgcatccagccacctctgagttggaggcaaccgaaaaagctcagatccgcaaagaagcggggctggaacgcgcaagctgggagagtcggcctgaagattttactattcgtggactaacccaactactgaagatattgcccaagctgggagcagatgacgcgaaagccagggccggactgttgtgggactcactcgctgaccttgaagcacgcggcacaggtgctttctacggttactacaaatggggctattctcacgaaacgaaaacagctcgattcgatgcagctttcatccggactctcaaccaggttgcatgggctcctagtaccaatggagaactcgtgcctcccggcctcgtggtgttcgacacacttgagtggaaacctaatcccttcttgctgactaagctcgccttcaaacctccaatcatcgaccagttagccaaagaggctggtatcgatcccgcggcgcttgatctactacgcaagtacggcattaccagcgttacagaactggcctcccggcttggcatcaccagcccaccgcccgaagttgagtcggcatctgatgcggagcccgaagccccggaagaggcgggcaccgacgtttacggcaacgcgcaagatctgtacggcgacgatatgccagaaattccgccggggacatctgatcctgatggcggcgacggcgcgacaagtagtacgggccgtggtggtagcgggcacactggcttccgtggtgagaactcgggcaacgcaggcgcatacggtagctcaggagggagcaccaaccaaggcggtaatggcggaaccagtggaaatgggcaagggaaacgttctcccggccatgccggtggacgaccgtttatttcctacgtcggcactcaccccgacgaggagacagatctagatggcatcgaccaagcgatgcgcatgcacattgaggagcaagccattatgctgatcattgaactggagcctatgctgcgacgcacgcccgaaggcaacccgggatttgatctctacgagacaggtagcgatggtaaggaagttcgctggatcgaggtcaagtcgatgactggctgcctgaaagatcgcgccgtagggctctctcgtacgcagttcgactgtgcgagagagcgaggtgctgattattggctgtatgtcgtcgaatacgcgaccgatcctgttaagtctaaagtgctgagaattcaagaccccgttgctcacgcccggacgttcacgttcgatcatggctggagccagattgccctaaccgaaccgccgtattgagcggcatctcggtgattctcgactcaacaatgaaaccctccagaatgagggattcaaagcagccaacatcaatgtataaacacaccctagcctgcctcagtaatcaaaagtcagtcggcctggcctctacgtagacatttagccctcagcggcttcaaccgaagctgctgagcgtctttcaccaggtaacgcatcgccttatgtacattgcgccggatcgttcgatcgtttcgtaaaacgatgccgatcccacacgcgctttcgtatttttctttatcgtgattacagctattgaagtgaccctgccccctagtgatgcgcccccacagttcaccgacttgctgtgccttgtagatgtctccacgaacctcgttgccattgaagaagtaggccgcatgaatgtgatagccccgatcctccccttgctcaaccgcacagatgtaaccagtgagatgatcaaagatcgggttgcgctgatgctcggcaatcaggcgagccaggtcatcgaacacgtgctcgacacgcaacctgacctgggcctcttgtcggtagtaaagatcgatcctgataatgttggtgcgcgagtagcgttcaaccacagcatcggaataatcacaaacacggtcctcctgctgcatagcctgacgacgacggtcaccctttttacggcgataccatagctcaagcgtcaactgacggatccgtgctaccagcacgttcatgctgtgctgatggtctagccaggccgtgccctcttcattcaagcagacaggaccggtaggacgacgttccaacccaatgtcctgacaagcctccctgaacgcttgcagatgctcactgtagctgtattcaatccggtcatcgaacagatccatcatctgcccgatatgagtaaagtatctggagagtctggtctcctcaactcgctcataacctgtacgggtttgcctgaaccgaaatgctgggctgtcatgctgctcgatggcctggacaagtcgttcaatctgaatggcgatgtcggactgggaaagataggtgtagatgttgcgcttggtcatggtgacgtgcctgattggtggtttgcatatcaggtacgtgcgctatgtactttttaactgatgacctatcgctagcttgaggtaggtggtgtgctgctgagccagataacctattgaatagttagtttccgatagttaatagctatataactagaagcacctcgtcccacggtggacgatcccggccaggcttggcattggggagctacattgcccagccttccgagagagtgcctcattgggatcatgagagagttagctgagaatgtaaggttccgaccagcagcataaacaccatgaccagctacaaaccggtcatggcgtttatgctggtttctagctggccatacttaggtgtccggtggaccgcactgcagctccctcagccaggtcacgctcttcgatccgtgccaggatccaatcgtgcacctcgctatcgacccagccgacgcagcggtcgccgagagataccggtttcgggaagctaccttccgcgatgtatttgtatatggtcgaccgggcaagacctgtcgagtcgatgacttcttttaaacggatgatcctcatgaacgggctcctcgtattcgttcagaggattggcaggggcgataaaaaataaccgcctaaacggctgtcgctcgtgctggcgtgagcaaccccgctttctctctaagctcctcagggcaaagggcttccgtagtaatcttcgtcgttccagcgtgctcgccgacttccctcagcagccagccaccgccagcgcccccatctagcaacatccccaaacaggaataacctagtcgcagatcactgggtagaagtctgaagttcaggcttgaccaggcaagtccatcaatccgtgaaaagcgcaccttgcacacccgtgcaaactgaatagtcatctcccaaagaaaatctatgatctcagtctcgtcgagcgagctcgcatcttcaacatccctcattggcttacgaaaaaatgcgctgatgtcacctcggacgccaaggaaaaattctgatttagctacatctagctgctcccagtgccgcgccagaaggtctgtcacgcaaccgctcagaaaaaactggagttgctcaatcgcgtgtctcggagcacgcctaaaaagacggagaaccgaggccggcgtggaaaattcaggcaatgagtatttatgcttagtagcggaattacgccagcgctcaagatcaaaccaaacgtcccctatataccgcacatcatcagcccattcgtccgcacactcatacacaacgaagccgatcttgtccgtccccaaggtggtttgccgatggttcaggttaaggacataactgcttttgagtttttcagcataaatggggctggcgactccgggcacgtgtcgccgaataaaccccatttcaacaagcttcttaatccgctgcttaagacttatctgctcaaggccggtaagtcgacatagctctacattcccgagcgaatttactacgccaaaacggtctgcatgagcggatagcactgcaagcagaagtcgattggatcgactgagcagtgaagtgcggttcggcactgctgccctcgtttgctccgccttcacagtaggcatcgaatagatttccacgtcgggcctagtggcgtgaatgtaaggccccttgattaggtgctcgacggcgccaaagtgcggcgcaagatcgatggggcgcgaaatcaaactcgcaatcccgagcttattgaccacgtcgtcatggatgcgaaatgattttttcagccgaccggctcgttgagccaacgccgttgtagcgatgaggatcgattcttccaagagcgagttgagcgtattagcacattctctcgtgggcactccaaggcaaccagccagctcatcaatagtgatcggccctgtggcagtgaactcataacgcagataaaacgaagccagcgtgaaccgagccttcgaatcaagccgccctaaatccagtgataaaatactatttagcatatgaattccgaaaataattacagctaaatataccctattttttcaagcgaaatctaataacgttattcataacgttatcaataatgaatatactggccctaaccagttctccagcaggaatagatgaaaatgggacgcaaaagggtagttgggctggattggcttgatcctgaaaatacgaatcaacgcctttgggccttgaagtatttgcaagcgaaaggcttagagcgaattttcgatagcggggagaggatccttccgaatgagcttccgtcccacaacgaaatgctggatgcaggcatgtatatcgagcaggacgctggcgcgagcaaactatttcgcgacatgaaggatgcttggcgccaggagagagacagaaacaagaaaaaggagagcggccgccaagtgtgcgcattcactctgagtacagccaccaagagccatctacaaaccatggccaaagagcaaaaaaagagccccgccgtgctgctggaaagcatgattacaaaggcttacgcagcccatgtgcgcagacagcaaaggcaactgccgaaacaaactctgcaagggaatcgtcagcacacaattcaagaccttcacgagatgttcgtcggaggcgccatacaatccgataactcagccatccccagccactccttaactgaagaatcgatgggtgaacatgagctgccggagcagaagtcaggcgagtacacttcggtagcttcaaatgagcgctctagatcgaagggtgccccagaaatcgttgaatctctgcttgagcaggaagaggctattaccctcattccagattcatcgtgcaatagtcaaatgccgtccgcggcggcagaggatgatcagccagaacaagcagcaccggtggacttaaattcaagcccgaccgatgatttcccttacgctcaaaccgaaaacccttcatccgtggtgaaaatcagtccccaaaagagaaaaacgttcaggttatccagcgttcgctaaccaaaagcctgggacaaggaacaacgtgattaactgtccgatctggagcgacatacaacgtttggcattccaaatggcattccatgcaaaaaataaaaccgatctttttcttaataaacaacaacttacatatcctgttcagattaccccggcgcatcaacagaacccgcccagtgcgggttctgttgtctctagggtttgaaaagcccgacaggacagaccttcagaattttccttcaagctatcgcgcccttgatgaactagcgcaccccgcgccacaacgctaacttcctcccgtcgctcctaatcagcgaccggctttgacaggccgaaaagtgtaatctttcacaccccttgataagacggcatgctttacgcattccgcctcgttcatggcggctgtgcgtggggcatcttcgggtgcgccgggttcctacacttccggtctgtcaacccgcgtacagctgccacccattcctgtttgacagcaggggcggtagctccttaaacagtgtgggagcttcatcatgaaaaagatcacccccaatcccccctccacaaccctcttcaccctcgccccagacatctcccccgaaaccctgctaatccaagccagcgaaaccctcgcctcactcaacgccatgaccaccgacctggccttcgaactcgaaggcgcccaccgtcacaagctgctggccactcagcaactgatcgtgctgggcgaactgttggtggagcgagtgctggtcctcacccaagccccccaaacattccagtaacaaaaaaggccgaggaaactcggccttttgctgtcatctgcctcagaaatcccagcgcgtcgtcaccatcacattgcgcgggtcaccgtaatacgccgagtcatagaacccgatattggtgaagtatttcttgtcgaacaggttgttgacgttaagcgtggccgacaggtttttcgtcagttgatagcgcgccatcacatccaccagccagtacgggtcctgggtgaatttttccgagcggccaccgcccggatagccccagttacgcacggtttgccaaccggcgctctgccagcgtgtgccaccaccgagcgtgagtttgtccaggctgccttggagtttgtaactggtatagagggtgacctgatcctcgggctcccaggtcgctacttttttgccatcggcatcacgcgcaatcttgtgggtatagcccgcctgcaactgccagcctggagccagttcgccggagatttccgcttcgtaacctttggttttgctctcggtgcccatgtacgaatagtcgacggccggctgggagttccaggcggtatcggcgattgggcgattggtctcgtgcacttcgaagtaggcgaggctggcgttcaggcggccatcgaagaattcgcccttgaggccgatctcgtagtttttgccttcgtccggttcaagcatggtgttggtgcggtcgcgatactgggtctgcggcttgaagatttcggtgtagctggcgtaggcggtgaagttttcgttgaggtcgtacgtcaggccggcgtacggcacgaccttaccgctttcttcggtgtcgctggtgccggtgacttgatagttggccacccgcgtgcccagcaacaggtgcatcgcgtcggtcaggctgaagcgcccggtgatgtaggtgccggtctggcgcgtgatttcatcactgaagcgggaggccttgccccatgccggttcaatggcttcgccgtgccagttgtaaaagtcataggaattgttgaagtagacagggttacggtaatccttgcccttccagcgagagctcgacacggactgcccgatcaccaattcatgctcacgcccaaacagttcaaacggccccgacgcgtaaacatccaggctgtcgctggtggtgtcgccggtgtatttggcggcatagatcgaactcgccgtcgcagaatcctgggagatgtagcccagcggcgcgtcatagccattgacctgatggttgtactggcctttggtgacccagccgttgtcgaagctgtgttccagggtggcgaacacggtgtggctgtattgttgccatgaaccccacttgggcccgttgttgaacgagcgcggcaggtcgagtttgttgccggtggcgtcgaagatggtgcgggtgccggtccagctggaacctttggggtcgctgtcctggtagtcggcgcccagggtcagcagggtgtccggggtcaggtcgacttcgaggatgccgtagagcacgctggtcttgcgtgagtagtgatcgaggaacgactttctgtcttggtatgccgccaccgcgcggccacgcacgttgccggtgtcggtcagggggccgctgacgtcgacctgggaacggtagttatcccaggagcccgcgcccagttcgatgctgcttttgaactcggaggtcggtttcttgcggatcaggttgatggtgccgcccgggccaccggcaccggtgagcaggccggtggcgcccttgagcacttcgacgcggtcgtagatcgccatgtcagtcatggtctggcctgccgagtattgggcgtcgcgcagggtcggaatgccgtcgtactggaagttctcgatggagaaaccacgcgagtaatagttggtgcgctcggtgtcataggtcgacacggtgatgcctggcgtgtggcgcattacgtcatcgatggagttgaggccgaagtcatccatgacctggcgggtgaccaccgagatcgattgtggtgtttcccgtggtgtcagtaccaggcgcgtggccgtggcgatggtgcccggggtatacgagcccgtgccttcggtgaccgtgccgagttggttggcgctgacttgggtggtctgcaactctaccttgccgtcctgggacaacggcttggcgaccacgcgatagccaccctgctcgtgctccgcctgcaagcccgccgggctcaacaggtgctccaggccttcgtccaccgagaaattacctttgagcccattgctctgaatgccggctgccagcgccgaatcaatgccgatcatcacgcccgcttgctgcccaaaggcccccaacacacggtccaggctaccgggcgaaatgtcatacgcacgaggttgggattgttgctgggtaggcgccgcagtggcggccatgatgctgtggcttgcggttgccaccgataaaccgaggataacggtgcgcaaagcgctgacgcggctgagcataaagactgtcctgtcgtgaaagggttgggtggacgcttttttctgcgtcttacctgtcttgatgctttagatgggaaaacctgccacgcggtgaacactatttttcggtcaggcgggcacgacggtcgccaggtagccaaacacccgctgcacgcgcacgggcagcaccttggccagcaggtcgaggctggcttccggctggtccagcgagaacgagcctgacacctgcaaactcgccaccgcagggtcgcagcgcagcacgccacgccggtagcggtcgagttcttcgagtactgcgccgagcggcatgcgctcggcgatcaacaggccttgggtccaggcgtcggcggtggatggcacggctgctggctgactgctctgaagacgattgaagatcaattgctggccgataccgagttgcgtgccgacaccgtgcaacggctcgacagaggcgctgcccgagagcatctgcacccgcgtaccctgctggcgaagcaggtcatggctgatgatgatctgtgagaatgccgcaggccgtacccagccattggcagtctggaccgcaatgtcggcgcgcgtgcctgtggtcaacagcagccgaccgaggttcagcgccaagtgggcgccacggatatccacagcggtgcgcgtatccaactgcaattccccggcattggccaggcgcaggtgccgtctctccccggtagcggtgtggtaatcgctgaacagctccggcaacagcgcccgctcgcgcacactcaggccaagggccgtggccacgctcaggccggcgaggcccttgagcacggtgcgccgcgatggaccactgcgtgcgcgcaacaattggcgggcgctgggcgcgggcaatgtgtgcgtgtggaggcgcatgtcgcggctgagcccagccaagcgctgccaggccaactcatgttgcgggttatcgttgcgccactgctggcaagcctgctgctcggcggcgccgcaggtgcccgattgcagcgcgaccatccagttcagcgcctggtccaacacgtgctcgtccagaggctgattattggcgggcttgaaacggttcatgccgcgtaaaccgccaggtagcaatggcgataggctttaagcatggctttttgcaccacattcacgctgaggtccatgcgctcggcgatctgtggataagtcaggccatccaactgggacagcaggaaaatctcgcgcaccttgctgcccaacccgtccagcacctggccgacggcgtccaacgcttcaagcaccagcaaacgggtttccggcgacggcatgtgttcgggctccaggatcatcagcgactgttcatacgctcgctccaacgcctggcgacggaagtactgcccgcataaacggctggcgacagtcgtaaggtaggctcgcggctcacgaaaaaccggcacgctgccgctgctcaggatccgcacgaaggtatcctgcgccaagtccagggcctgctcttgcccacccagcttgcgccgcaacaactgcaccacccagctgtggtgctgggcgtagagttcgcccacaacctgatgggcagaagaagatgaggccatcggtgcgatatccaggggacggctaaggaaagtcacacatgataatacttctcattagagacgggttaggagtttctgtcttacctgaagaatgctgcgagctgttgcaagtcaccgatatggactacacccgcttactcaagcagccagaaaagtcctgcatgttggcgcgccgtggatgaactggcgcgaactcggttgctcgaatagtcttcagaggactgctcgtctgccgaagattgaacgcaatcactcaagcccccagactccagcacgcccattcacgaataaggaggcccttcatgcaaagcactgtctcgcccagcccccttgtgggcgtcggcctctatacccccagtgaagcctccctttacaccggtatccccgccgcagatattcgtagatggctattcggttacagttccaacggcattcatcatcccggcctttggcaatcagaactgatggatgtgaacgaatacatattgagcttccatgacctgcttgaaattcgcttcgtgcacgcctttcgtcaacacggcgtgagcctgcaagccattcgcaacgcctcccgacaagcctcagagctgttcggtcaagcctacccgttcacctgcaagcacttccaaacagatggtcgcagcatctttgcgactgttctggatgagacaggcgacgagacactgctggacctgattaaaaaacaatacgcgttcaagcacgtcatcagcccatcgttgtacgaggggatcgactacaccggcaaaggctcggcccaacgctggtacccagtcaaacgcagcaagatcgtcgtactggaccccgccaggaattttggaaagccggtactgactggagcgggtatcgacaccgcaacgctgtttaacgcctatgaggcggaaggaaacgatacaaaacgtattgccctgctatacgagatcccaccctccgctgtaagagccgctatcgagttcgagcaaaggcgcgcggcttgaatttccttctggaccacaacctgccacctgcactggcgcgagcattgaatgaactttcaaaagtccatgagcatggcgtagttccgctcagggataaattcccccagaacgcaagtgatgtttcctggatatcagtgcttcgcgatgaaggtgattgggtcgttatctctcaagaccgctttaccaaagggcatgcagaaaaacaggcattccgagactgcgggctccccattttctgtctggcgaaacactggaataacgagacctattggaacaaggcgcacaatctcgtgcgatggtggccggccatcatgaatcaatcagcgttgataagaggagcagccgcattcagcgtgccatggcgtttttctgcgcccgggaaatttgatcagataaaaatgtaagcctgcaacgcaaaacagtccctatctggaatcccccccccacttacgattaccctgctcccctctatcagacacccggaagtccgatacccgtgttcaagccactcgccatcctcacccttgcctgctcccctctgcttgcaaacgccgccgacctggccggtgtctggaccggcaccttgggcaagtccgcgatcaccgcctgtttcaacggtgcccacggtgccaatggcagttactactaccaacgcatcctgacgcccattcagctcactcaagccaacgccagtgagccgtgggccgaggaagggcaaaccggcttctggcagttggatgagccgcagggcgacacgctgaccggcatctggagcaaaaccctcggcggtaaaagcctggcgctgatgctcaaacgcgcggacaccgacggttgtgccagcgatgcctataacaacgcgcttgaagccgtgccacccgcggtaaaggtcgagcgaaaaaccttcgccgaacacgcctatcaagtaaagacccaaggaggccaggtcatcctgaaacttgaaggcgacggtgcggccatcgacaagatcaaccgcgagctcgcgcgcctggccatcaacccggacggccaggccgatttctaccgggagcggcgcaactcactggaccagagcggcggcaccactaccagcgagatcgcggtagagccgttctactggtcatcgcaatggatcaccgtgcggttctatcgctggtcggcgggctacgggcgggggggcatcagctggggcctacacagttggaacctgcaaaccggtgacaaggtcgacccctggacgtggttgggcggccatgagcaatgggacacgccctactcgggccaggtcaagttgccggctgctttcagcacctggctgaccaagcagaccaccgccgacgaagggtgcccggctgtgaccagttattcctcgttcgacttgagcttcaacacccagggcctgcaactgtcgacgcccgcccagggcgatggctgcgataacgaactgagctttacctgggagcaactggagcctgtgctgaccccggaaggtaaagccgcactgcccagcttgatggcgccgtgacctaccttacaaaaaacccacattcgttcacgaaatattcagaaacgccgacggatactagcccattgcaatgaccgttcccccggacggtcctcctgccctggtagccacactccatgacgcgtcccgctcccctgctgttcctgcttgctggtctgttgttcttctttgccctgggtaaccacgagctgcaaggctccaccgaagcccgtgtggctgggatcgccatggccatgcacctggacaataactgggtggtgccccagttgttccgtgaacccttcctggaaaagccccccctgagcctgtggatcgatgccggggcgattcgcctgtttggcggcaccacctgggcggtgcgcctggcttcggcatttgccgggttgttcagtgtgatgctgctttacacaatgctgcgcaggttcggccgaccgcagacgctggcgttcagcgccgcgctgatcctggcgaccatggccagttattggagcaatgcgcgcggtgtgggtgaggattcgctgctcaccctcggcgtaaccgccgcgctgctggcgttttaccaggctgtgcgacccgatcgtgaagggtcaagcacaggcgcatgggcactgtttaccgccgggatggtgatcgccaccctcagcaaaggcgtgctgggcctggcgatgccgggcattgttatatttgtgtacctggccagcaccagcgtcatggacaagcgcctgcgccttggcgactggctcaagcccgcgctgttcaccttggtggcgctggtgccactggtgatctggctgggcttcctgttccagcgtggcggcatgcaagcggtggccgaagtgttgctgaccaacagcgtcggccggttcagcggttcgtttgtcgaggccgggcattacgagccgttctactactacatcgccaagctgccggaggcattcctgccctggaacatcctggtgtacctgggcctgtggcacttccgtaaaaccctggtgcgcaaccgctaccacctgttcttcagcgtctggctggtggcgcagttcaccctgctgaccctggcctcgagcaaacgcacggtgtacctgatggcactcgcgccagccgccgccgtcctggccgcggagtatgcacgagtgctgctggcgtggctgaaaacccgcaaacctgcgctctacacacatcacagaaccctcgtgggcggcgtgttcaccctggccgtgggctgctatctgattgcagcgttctggtttgcgcccaaggccgatgtgcgccagtcgttcgtcccggtgatcagccaggttcaggcgtttaaagatgaaagcagggaggtggtgctgttccagcccaacgagcgtatcgccggggccagcgtgttctatctgcaggcctacttgccgatcctgaagaccgaggccgagctgcacaactacctaggcgccaagcccggcaacattgcgttgctggaccataccaacgacctggccaccccggtgaaggtgatcaagcagatgtcgatcaaccgccagccttactacttcgtggagcagtaaggccggcgcggggcatcagtgtttggtgaccttgtccaggtaacccatggcaaacgccgagaccacgaaggtcatgtggatgatcacgtaccacatcaggtgctgcggatcgacgttcttggcgtccatgaagatgcgcagcaagtggatggacgaaatcgccacgatggacgccgccactttcatcttcagcgacgaagagtccatggtgcccagccagttgagtttctctttgttttcatcgatatccagctgcgagacgaagttctcgtagccggaaatcatcaccatcaccagcaagccgccgaccagggccatgtcgatcaacgacagcagcagcaggatcacatcagcttccagcatggaaaacacattgggcaagacgtggatgatttcctggaagaacttcagcgccaggatcagcaggcccagggaaagccccagatagataggcgccagcagccagcgtgaggcgtacatagtattttcgataaagcgttccattggatctcacacagcttggctagaaatggcggcgagtataccagccgctacaagacagctgtaaccacgagaaaactgacctgtgcggcatctgtaagagaatttttctgctagtgtcgagcccaataacaactcggctcgatgacgtcggacaggaaaaactcagatgatggatgtgcgatcccctttggccagtatcggcctgtgcgcggcattgctgctggctggcggctgctcccccagtgacgagcagaagcagaccaccctcgaagagaaaaccgcaaagttcgaacactccctggacagcatccaggaccccaagctgcgtgacgccgtcgccgacctgggcggttcgctgctgctgctggagcgggcgcgggtcaagctcgccagcaaacccatcgaagccgagtacggcgaagacaccctggccctgctcaagcactaccccacgccccaggcgctggtggacacctatatcaatggcctgttcgtgctgcgcaagacctcccattcagactacctgaccgacttgcagccggtgttcccgttcagcttcaacatgcctgaccaattccctttcccccatggcctggagtggcagtcggtgaccttgagcaacaacaaggtcatccccttccagccggaatggtcggaaaccgatccgggcatccagctgagccccagcagctccaacctgactaaccccgacgacctgacggtgacctacccgttcatcgacggcatcgagacggaaaacaagagccagccgcagcccgtcagtctcaagggcacggtggaagtggtcgcgccgggcaaggtgttgacctttgacctgtcgaaaaaagacgtgggccacaaacgcaccgagggcaacatcaccctcaacctgctgctcctggaaaaaaactacgccgagatcgagctgaccaacagccagccgctggcgcctgaagtcggcgacgaatcgcccaacccactactggtacaggcacgcgacagtaccgggcaattccttacgcgctccggctcgatcaacgaaagcagcgcccaggtggcgttttatgagaaacaactggccgagatgcaaaagcagaaggcctggtcggaggcgttcgaaaaacagctcaccgatgagcaaaaagccttcgaacacaaacaaagcagccattacgccaaggtgtatttcaatggcgtgatcgacaacctgcaggtcaacgtactggacttttccaccgccacccgcacgcgcaaagacctcgacctgcccgtgatgcgcttcgacaagaacagcctgcagaacagcgtccaggccctgccgatgccggtcaccgtgtatgacgacggcgccgccagctggctcaaagacgcgggcatgaccgaggaccaactgaaaaacagcgtcaccatcagccagtcggttgaagacgccagcgccgcacacatcgtgttcgaccacccgttcaccttcaatgacgacctggtgggcagcgagcgcaacagcagcgagtcgccagtgaccttcttcaccgccgacgaaaaaggcgagcgcggtgagccgatcgaactgccggccgaggcgtttgaattgaacccggcacgcggcaccctgacctacgacctgaacctgttcccggaaaacccggcgtatgtggtgggctcgatcccgctgttcctggcgaccatcgacaaagccgagatcgacgtgaccaagctgcccaaggggctgtcgctcaaggacaacgcgctgatcgtcgaccagaaggagttccccgccgacagctggcgcttctacgccaaggacgccagcggcaactacctcaaggaaatcctcggcgtcagccaccgtgccgaggagtacggcacggcgctgtttgacgtgcattacttctacggccagccgaccgccctggaaagctaccagcgcaccgacctgagcaccgtgcaatacggtttcgaggtcaagctggacaagcccgagggcaaatagcgatcagtgctgggtgtcaccattgagctgtcgcagatgggcctgcatgtgcaggcaccagatctgcgggtcacccgctttctcgtaaccgtgctgggtcaggctgtccacgatggactccagaatattttccgcgacgaagggcccggggaacgggccttgggacttgatagtggaaggctgttcaccggtcattccggcggcaaacaacaaggtccacatcccgttatcccccgcaagagggcgaatggaacattcgatacgggtgaccaggccaaagcactggcgggtaaggcaaaggttgcgcggcatggcggcgaccctcggtagatcggtgttcaacctgcgcctggggcgaggctgtttctatcccgcgactcctgtggatatcccttgagcacagaatagaagaaaaccacgacaaaccaagattgtagggaccaacgggcgttggccctacagtcgcgccaaatttgtgacggttttactggtcatgtggtgaggggattgttgtggctatggggcttgttgtggcgagcgggctcctgtggtgagcgggcttgccccgcgttgggtggcgcagccgccctaatccagtcgccgcgttcttccagacagaactcagttgtctggttttggggccgcttcgcagcccaacgcggggcaagcccgctcaccacaacaagcccgctcaccacaggagcccgcccagcccaataagccactacgccgtcaggtgggcttggcttgcgccaacgcctcctgcgccaactccttttccgcctccttcaggtcatcctcgctgatcatctcggcaatcgcgcgcaaccgctctaccacacgcgcattcaccgtgccctccgggaactgcccttcggcatccggctcaccggcaggctcgcccaccaacaggctcaacgcctcgtccgcctggcgcacggcatagatatggaactgcccggcacgcacggcctgcagcaccttctcatcgagcatcaacgtggcgacgttggcctggggaatgatcgcaccctgttcaccagtcaaaccgcgcgcttcgcacaggcggaagaagccttcgatcttctcgttgaccccacccaccgcctgcacttcaccaaactggttgatggagccggtgatggcgaagcattgcttgagcggggttttcgacaaggccgagatcaaggtgcacgcctcgccaagggaggcgctgtcgccgtccacataaccgtaggactgctccagcgcgatactcgccgagatcgccagcgggaattcttgggcataacggctgcccaggtaaccggtgagaatcatcacgcccttggagtggatcggctggccgaggttgacctcacgctcgatgtcgacaatgccgctgccgcccgggtacaccgtggcggaaatccgcgccggcacgccaaaggccgagtcaccgacttccagcaccgtcagcccgttgcacttgcccaccgctgcaccggcagtgtcgatcaggatgaccccggcgagcatgtcgtcgagaatccgcgccgacacccgcccagtgcgcgtggccttggccttgagggcgcgctcgatatgcccggcatcggtcatttcgtcgcccgccaggtggcgaatgaagtctgcctcgctgaccagttggaacaagtcaccaatgcgcgccgacaagcgcccctggtgctccgccaaccgtgcgctgtaagtcgccaaccgcgccaccgcgtccgaagtcagcggcgccatgccttcttccgacgtgcgagttttcagcaattgggcgaactgctccaggctttcgtcgaccatcgggatgtcttcgtcgaagtccaccagtacgcggaacatctcctgaaagtccggatcggcatcctgcaaagcgtagtacaactggcgcgaaccgatgatgatcaccttgacctgcaacgggatcatctgcgggttgagcgtcacggtggccaggcggcccagctcgcccagcggcgattccatcttcaacttgcgcgattgcagggagcgcttgagagcgtcccacacgaacggctcgctgagcattttttcggcttcaagaatcaggaaaccgccgttggcacggtgcaacgcgccggggcgcagctggcgataggtggtgtagagcgcgccctggtcggtgctgtattcgatgcggccgaacaggttgtcgtaggtcgggtgcggctcaaacaccaccggtgcgccgccgttgaccggatggccgaccaccaggcttgggcagtactgctcttcgagcagcttgcgcgcctgggcgtcggttttggcgtcgtccaccagttgctcgaccacggtcttgagcaagtacacctgcatggcttgcaggtaaccgcatacgcctgcgttttccgcgtacttttccgacaacggtgcaagcaaaggctgcaaggccagggtgatggtttcttcgttgaactggcgcagttggttgttcgactcacgcttccactgtggcaggctcgccagttcttcgttgaggcgctcttccagctcggaaatatccgtgtggaaccgctcgcggtcggcttccggcagctgcgagaactcagcttcgtccaacgccttgccgtcgagcatcggcgtgaaggcaatgttggagctgtcgcggtacagcgccacatccttttccagggccaggcgttcgatcacgtccagggccttgtcgtagcgctggttgaaggcgcggtcgatggcgctcttgcgctgttgatacgtcgggtgttcgaaggccgccgggaaggtggctgcgaggttgtcgatcaaaccgttgatgtcgttgatgaacgccgccgctgcgccgccgggcaattccagggcgcggggttcgcgaggctcatcgaaattattcacgtagacccaatcagccggggtctgcaggcgtttgccttcggccttcaggtagcgtttgacgaacgaaaagcggccggtgcccggctcgcccatgacaaacacgttgtaaccggggcgcggcatggccacaccgaactgcaacgcttcaaccgcacgttcctggccaagcacaccgcgaaagggctccaaatcattagtggtcgagaagctgaactgttcagcggagaaggggcgagtcagcgcttcgggcgctagacgcaagctggcagcaacaggatcaggcatcgggcttccttacatcaggcggggcagatgacggcattctggctcccggttacgcgctctggcaaggcgcgcctgtgggaaagcatagacacgggatgcgtcccgcaaaaaaatcgcgacatcgcggattgttttataaaaatgcacggaacccttggaacgtgcctaaactccaaactgcgcgggttggactaataactggcccctagggcgctgcgaagcgcctgaacccttgtccattggtttgcacacaaagagaacaaagctatgaaacggatccttctcggtactctcttcaccgtcgtctccctcaatgcaatggcagaagcaccaggtggcccgaactgtggttggggcaacatgttgttcgaaggccagcgcggcactccagctcacttcctggcttccaccaccaacggtacttcgggtaacgccactttcggcatgacctcgggcaccaacggttgcagcaccaacagcgccctgacttacggcggcaaatcgtggattgccatgaatggcatgatgaacgagctgtccgaagacatggccaagggtaatggcgaagcactgaccacctacgccgtggtactgggcgtggcgccggaagatcgcgagcacttcgcggccgtgacccacgagcacttccagcagatcttcagcaaggctgacgtgaccgctgacgacgtgcacaacaacaccattgctgtactgaaaagcgatgcccgtctggcgaaatacgctacccaggcttaagctcgtgcagcccgcgcctgcttaaggcgcgggttttatttttgggcccgcctcccctttgggtctctcttatttccgacttaagttgcccctatgctcaaacgctttgcctggatggcactctttgcctgcgccccgctgtacgcggccccgcatcttgatgatcaacgtttgcagcaattggccaacgatccgttctggctgtccctcggccattatgaagccggcaaaatcagtggctggcgcagctatgtcagcgacaagaaattcttcctcgcacccgatggcgcccaccacccggacgccgagctcaaggccaccgttgacgcgctctacgcgcccgccagcctgggtcaaaagcacgcccaatgcgtttaccccgcacggacccgctggctcaaggatcagttgcacctcactgacctgcctgccgtggactgcaccgaattcaagcaatggttcaaggacgtcgccccgcacagcgcagtgatgatcttcccggcggcctacctcaacagcccgtcgtcgatgtttggccacaccctgctgcgcatcgaccaggccgacgtgcaaagcaacaacaccgccctgctcagctatgcgatcaacttcggcgcctatatcgaaggctccgacaacagcattctctacgcctggaaaggcctgatgggcggctaccctggcctgttcgccctggtgccctatcaggaaaaactctccgaataccgtagccttgagaaccgcgacctttgggaataccgcctcaacctcacccaggtggagaccgagcgcatggtcgagcacgtgtgggaactcaagcagatccagttcgactacttcttcttcgacgaaaactgctcctatcgcctgctggaactgctgcaagtggcgcgtcccggcctgcgcctgaccgaacagtttccactgaccgccatcccgaccgacacagtcaaggccgtcaaggatgcgggcctggtggaaaggatcgactaccgcccgtcccgcgaacgcgagctgttggagcgcgccaagccgctggacagcgacgaacagcaatgggtgttgaaggtcagcgatgaccagaagcagctgcaggagcctgcgttcaaggccatcgcgaaagaccgccaagccctgatcatcgacgccgcctaccgcctcggccgctaccgcgccaatggtctggagcgcgacaccgcgcgctcccagcgcagcttcgaactgctgcgcgcgatcaaccagaaccccgcgcccgacctcaagatcaccccgcccggcctgccggaaaacggccacgaatcgcgcacctggcaagccggcatcggcacccgcggcgacaaggccttcggtgaatacggcctgcgcatggcctaccacgacctcaacgacaacgccgaaggtttccccctcggcgcacagatcgaaatcctgcagatgaaactgcgccagtacgaaggcaaccactggcaactgcagcaactggacctggccaccatccgctccctgaccccacgcaacgccctgttgcagccgtggtcctggcaagtcactgggggccttgaacgcgtgcccggcaaacacgacgacgaaaccctggtcgcccacgtcaacggcggcgccggcggtacctggcagttgagcgacgacatgctcggcttcgccctcggcaccgtgcgcgtggagcacaacaacgacttcagcgaagccatctccccggcagccgggttcaacaccggcgtgctgtggaagaacccactggggaacctgagcctggaagccaagggcgacttcttcaccaatggcgaagtgcgccgcagcatcagcctgaaccaacagtgggaattgtcgcgcaacctcggcctgcgtttgagcgcccaacgcgagtacagccacctgtcgacgccagtgaatgaagtgatgcttgaagtgaagtggtatcactactaacccacgcccagtgaaccagaatgtgggagggggcttgcccccgatagcagtgcatcagtcacgtatccatcgactgacacgccgtcatcggaggcaagcctcctcccacattgggtccgcgtctattcagttccctctaaaaggagccccaccaacatggccgttaactgcaccagcctcgaagaagtccgcacccacatcgaccgcctcgaccagcagatcgtcaccctgctggccgagcgtggcgcctacgtctcccaggccgcgcgcttcaagaaagacacggacagcgtcaaggccccacaacgggtcgaacaagtcatcgccaaggtgcgggagatatcccaggccgtgggtgccaatcccgaggtcacggaacaggtgtatcgcgcgatgattgcggcgtttatccagcaggaattggcgcagcatgctgcgctcacggaaactcgctaagaattacccaaattattcgcctacacagcaaacgcgcaagccatcctcaagcccctgattactaagaaggaaatcttgcggttttttttagcttttttgagtcatcgaaaacttgctccgacgaagcctcgctttatggggatttgtgtctagtctcgggtagcagtcaaattgccaccacgtctatacacggatctgaataggtaagaggcttactatggaatttttcgaaaagctcaccagtctggccgccaaggttcggttgcaaggcccggccattcaaacagaagaagcgaccaaaaatgcttttgtaatgccgtttatcaacacagtgctgggttatgacgtgtttgatccgcaagaagtgacgcctgagtttgtctgcgatgtcgggacgaagaaaggtgaaaaaatcgactacgccatcatgaaagacggcgaagttcagatactcattgaatgcaaaaaaatcggcgagtcactgaacatcaatcatgcctcgcagctatttcggtattttcatgtcaccagcgcaagaatctcaattctcaccaacggtcaggtctatcggttttttactgatctggacgcacctaacaagatggacgaaaagccatttctagagctggacctgctggacattgatgagtattccgtaccggagttgataaagctgacaaagtcagccttcgacgtcgattcaatcattaacgctgcgggagagctgaaatatgtcagccagctcaagaagctgattggcgctcaagtcagcaagccggaagacgacttcgtaaaattcttcgcctcccgcgtttacgaaggcgtgatcacgcagaaagtccgtgagcagtttttcgaactgacacgaaaagccttggctcagtttctgaatgaccaaatcaatgatcgactcaagtcagccatgagcggcgtaattcaaccaacgatagcttcattgactgtcacgaacagcgcgaatacggatcttcaggaacgagacgaatcggaagacaagatcctgacgacgcttgaggaactggagggttatcacatcgtccgcgctgtcgtacgctccgttgtcgatgccaaacgaatcgttcaacgcgatacccagagctattttgggatattactggacgacaacaatcgcaagcctatctgccgtcttcacttcaatcgcagccaaaaataccttgggatattcgacgaggaaaaaaatgaaacccggcacgccatttcatccattgatgagatttacgaatacgcggatcaactgaaaaaaacagtgggttattacgactgaaagccgcaccggaatattttcagccgtcgataaccctgtggtgagcgggcttgccccgctcaccacagaagcaaattcacctcttaagttgcagatgtcatcgcctgggtcaggtcatccactacggctttgcccatctcacacagatagtgcgcggcccaggcgtattgctcgccacgtacatccatcgcagcttccatggcgagtttcttggaataaaaaagcaaagtggaggcgtgctccagcgcttcctcaatgggcatgccggaattgacacgaaacagcggtttttcgttttcgccgtagtcgccgaaagtgacgacgccgagtgtggtgattgcggacaagggtggatcagggacgactttgctcatgatgattgctctcttatgaagtcgagccaccagatcacatcgctaaacatgaagagggtggcagctgtgtgcaggttagcgatccgggtctgagagcaccccgggtagactcaaaggtctcccgcacacagccgccataaaacgctaaaagctgacagatgccagctaatactattgggagcggtgccactcttgaggctcggatcgctaaacccggccgctgatatgcagcgacccaaagaggctaatgatccaaacggtacgtcacaataggccagagattctctaggaaacgtcctgcaatttaaagggaatcgtcattgatggccctttagcccaacacctttctcaccatcctttcacaccgccccaacaaacccctgactagacttcccctatcagccgtgaaacggccagggagtacgccatgtggcggtctgcggtaatgctgtgtgcagtggtgttgttggcgggttgccagtcgacccatcaggagttgttggccaagggttacccaccggcgtttgccgatggttttgatgacggttgcagcagcggtcgccaggcggccggggtgatcagcggggagtttcgcaagaacgtgccgcgttatctcaaggaccgtgaatacgccgagggctgggaggatggttttcgccagtgcaaggccatgcgcgagaacgaagacctgcgcgactacaaggacaatcactgggacgaccgcgaacgcgcctggcagcatgagaaagaccgcgacgccgccagggcctatcgttcgcagtaggtagcggacgcaaagcgtccagggcagcattcccacgcagagcatgggaacgattgcgcggcgatcatggcccaaactccattgagggagaacgtcatgagccgagcttttgtaaacgaggataacgccgccgaccaggccgaccagccggtagagcgccaggtcagtgagcagcccaaccgccttaccgcgcaagggctggcgcagttgcaggccaaggttgcgcagttgcagcacgaatacggcctggagtccgccaaagacgacaagcagcgccaggcggatcttgagcgggatttgcgctacttcaaccagcgggtgcagagcgcccaagtggtggcgcccgcaacgtccaccgacaaggtgcagatcggcagctgggtaaccttcgccaatgagcaggacgaacagcaacgcattcagttggtcggtgaagaccaggccgacgccggcgccggcttgatcaactgggggtcgcccctgggccgcgccttgctgggcgcccaggtcggcgacgaggtgttgtggcaacgccccgtcggcgatcagttgatcgaagtgctgcggatcgagcccgaggcttagacgatgccttgggccagcatggcgtcggcaactttgacgaagcccgcgatgttcgcgcctttgacgtagttgatgcggccgttttcttcgccgtagtgcacgcaggcatggtggatcgactgcatgatgttgtgcagcttgctgtccacttcaccggcgctccacagcaggcgcatggcgttctgtgacatttccaggccactcacggccacgccaccggcattggacgccttgcccggggcgaacaggatgccggcctcgataaagatatccacagcctccaaggtggtcggcatattggcgccttcggccacgcagaggcagccgttgcgcagtagagtacgggcggcctcggcgtcgagttcgttctgggtcgcacagggcagtgcgatatcgcaggccagttcccaaggggttttaccggcgcggaattccaggccgtaacgtgacgccagttcgctgatgcgcccgcgctgcacgtttttcagctccagcagggccgaccattgttcctcggtcaagccgctctcggcgtacagggtgccttcggaatcggacagggaaatcaccttgccgcccaggtccatcaccttgcgcgccgcgtattgcgccacgttgccggaaccggacaccgccacgcgcttgccttcaacccgctggttgttgcgcttgagcatttcttcggcgaaatacacgcagccaaaaccggtggcttccgggcggatcaggctgccgccgtaggtcatgcccttgccggtcagcaccgaggtaaattggttgctcaggcgcttgtactggccgaacaggaagccgatctcacgggcgcccacgccgatatcgccggccggcacgtccacatctgcaccgatatggcgatacagctcgctcatgaaggcctggcagaagcgcatgacttcggcgtcgctcttaccttttggatcaaagtccgagccgcctttgccgccgcccatgggcagcgaagtcagggagttcttgaaggtctgctcaaaggcgaggaatttcagcacgcccaggttgaccgacgggtggaagcgcaggccgcctttgtacgggccgatggcgctgttcatctggatacggaaaccgcgattgacctggaccttgccgtgatcatccacccacgacacccggaaggtaatcgcgcgttccggctcgcagatgcgctccaggatgcccgaggtcaggtagtgggggttggcttcaagaaacggccacaggctgcgtaggacctcttctacagcctggtggaattccggctggtcagggtcgcgtttcttgagacgggcaaggaaggattcgacggattcgatcatgaaaagtctcggcaaattgattgtttttaaatgagattgggccggactttaacaattcatgtcgcaccgcgacagggcaaaatgtcgcctttgtgaatttaaatggtgcattagatgtaaatcacaggccatttctgcccttaaacagggatttcagctcaagcgacgcaccaatagtcacacagctatcgggggcaagccccctcccacatttgaaagccaaaaaaacggagcccgaaggctccgctctttcaaaccaccagcccggatcaggccagttttttgtgccgtacacggtgcggttgagcagctgcttcgcccaggcgcttcttacggtccgcttcgtactcggtgtagttaccttcgaagaacaccgcttgcgagtcgtcttcgtacgccaggatgtgggtcgcgacgcggtcaaggaaccaccgatcgtgagagatcacaatggcggcgcccgggaagtccagcagggcttcttccagagaacgcagggtttcaacgtcgaggtcgttggacggttcgtcgagcagcaggacgttgccgccctctttcagggtcagggccaggtgcaagcgaccgcgctcaccaccggacaggtccttgacgaacttctgctggtcgccgcccttgaagttgaagcgaccgacataggtacgcgacgggatttcatagttgccgatgcggatctggtcggaaccgtcagaaatctgctggaacacggtcttgctgccgtcgaggtcttcacggctctggtccacgcaggccagctgcacggtttcgccgacttcgatggtgcccgaatccggagtttccttgcccatcagcatgcggaacagcgtggatttacccgcaccgttaccgccgattacgccgacgatcgcgccttttggcatggagaacgacatgttgtcgatcagcacgcggtcgccatagcctttggaaacgttcttgaactcgatgaccttgtcacccaggcgcggaccggccgggatgtagatttcgttggtttccgaacgcttctggaattcctgcgattgcatttcttcaaagcgttgcagacgggccttggacttggactggcgggccttggcgcctttgcgcacccactccagttcttccttcatggccttttcgtgggccgattgctgcttggattcggcggccagacggtcggacttggcttccagccaaccggagtagttgccctcgtaagggataccggcgccacggtcgagttcgaggatccagccggcgacgttgtccaggaagtagcggtcgtgcgtgatcgcaaccacggtgcccgggaaatcgtgaaggaagtgttccagccaggcgacggaatcggcgtccaagtggttggtcggttcgtcgagcagcagcatgtcgggggccgacaacagcaggcggcacagggccacgcggcgcttctcaccaccggacaggtgttcgaccttggcgtcccacgccggcaggcgcagcgcgtcggcggcgacttccagctggcgctccaggttatgaccgtcgccggcctgcaggatcgcttcgagcttggcctgttcggcggccagtttgtcgaagtcggcgtccggttcggcgtaggcggcgtagacctcgtccaggcgtgcctgggcgttcttgattacgctgacggcctcttcgaccacttcacgcacggtcttggtcgggtccaggatcggctcttgcggcaggtagccgatattcagatctggcatcgggcgggcttcgccttcgaactcggtgtcgacgccggccatgattttcagcagcgtggatttacccgaaccgttgaggccgagtacgccgatcttggcgcctgggaaaaaggacagcgaaatgtttttcaggatttcccgcttcggggggacaactttgcccagccgatgcatggtgaagacgtattgagccatggagaacctagcgtcagtgactgatgaattaagcggacgaagcccgtgccaggccatgcgcggcgcgggccgttgactatcatcaatgcctgcgtgcggtataaagcctgaatatctggggctggaacgcccccgcgtaaccggcaaagctacctgaatgcgcttggtcagtccagccaggcaagggctggcactttgccacaagtcaaggcatgctagccgccctccgggcgtccggcttatagtgcacgtcgcgcgccagtccagccaaaccgcaggatcacagcttgtccaaagtcacgccgccaactcccctgcgcgccgctcatatagcgccgggagcgcccctgcacggcaccctcaaaggcgcattggcgacgctcgtcctcatgctgctcgcattattgttctggcaactgctggaccaactgcagcaaaaccagaagaaccagcagcaatacaccatcgactacagcgccgacctggctgaacagatcagcctgaacatggccctcagcgcaaagatcgccctgaacctgctgccgatggtcgagccgccgcgtgacagcgaacagcaacaggccttgatgcgtaccttgcaacgttcgttgccggaactgcgcagcatcgccctgcttgcccccagcggcgcaatgatcagtgacagcgccactgatagccaggacagcgcctggctcgaagaactggtgcaacgcagccacggccagtcttattacctgagcaacagcaatgacggcaccctcatctatctcttgttgcaccagcccagtggcggctcacggatgtattgggcgctgcgcctggcgcccaactacctgaccaacctcacccgccaggacggccagggccagcgcccgatgtgggccatcgagaaccgccttaaccatcgcgtggtcagccgtgacagcggcatgccggcgcagtggacctcggcgctgaccccggacgaattgaacaaaagcgtgctggtcacccccctgagcaaaagcgactggcaattgcgcgggctgttcgaccgcagcgccgtgctggagcaactgctgccggccttcatcggtaaatgcctgctgggcctggcgttctcgttgatcccggtgatcgtgctgctcaacatgcgccgccgtcagcgccaggtgcatgaggggcggcggcgctaccaggatattttcgaaggcaccggcgtggccctctgcgtgctggacctgtcggggctgaatgcgttcttcgacaagactcggctggaaacccgcgagcaactgcacgcctggctgcaggacaaccctggcgagcgccagcaactgctcaaggaactgcgcgtcaccgaggtcaaccaggtggcggtcagcctgctgaatgtgggttcctgcgagcaggcctgggagcgcctgatcgatgactgcccacgcaacgctacgtccatcggttaccagattctcgaagccgtcctgacccaacaaagccagttggagctggaaatccagctcaaggacgtggtcggcaacgagcaatacctgtggctagtgatgcgcctgcccgagcagcaggacgatttcaaggcggtgatcctcagcatcagcgatatcaccagccgcaagctgatcgaactgtcgctggtggaacgcgagagtttctggtcggacgtggtgcgcaccgtgcccgaccacctgtatgtgcaggatgtgatcagccagcgcatgattttcagcaaccaccatctgggccacaccctcggctataacaaggccgaactgcagcaaatgggcgagtacttctgggaaatcctgctgcaccccgaagacgccgagcattaccacgacttgcgccagcaacagcgccaggtcggctacaccacccaactgcaatgccagctgcgtttccgtcaccgcaataacgaatggcggcgcttcgatattcgcgaacaagcgctggcgcgggacaagaccgcgcagatcacccgtatcatcggcgtggccaaggacattaccgaccagatcgaagccagcgaatccctgcgcgacagcgaacagcgctaccgcatgctggccgaaagcatcagcgacgtgatctgctccaccgacagccagttggccctcaattacgtcagcccgtcagtcaacgccgtgctcggctatgacgtggattgggtgttcaagaacggctggcagtcgatcatcgccaacccgcagcaactggccggcatttatagcctggtggaacagatcagccgcgcgctgggcgatcccgacgcgctgaacaggctgcgtgatgagatccagacccagctgttcctgttcgactgcctgcgtgccgacggtcgcaaggtgccgatcgaactgcgcctggtgctggtgtgggacgagcacggcgccttcgagggcatcctcggggtgggccgcgatatcagccagcaacgccgcgccgagaaagacctgcgcatggcggccacggtcttcgagcactcaacctcagcgatcctgatcaccgaccccgccggctatatcgtgcaggccaacgaggcgttcagccgggtcagcggctatgcggtcagcgatgtgctcgaccagttgccgaacatgctcaccgtcgacgaacaacaggaagcccacctgcgctatgtgctcaagcagttgcaccagcacagcacctgggaaggcgaagtgtggctaaagcgtcgcaatggcgagcattacccggcgtgggtcggcattactgccgtgttcgacgatgaaggtgacctggccagctatgtatgctttttcagtgacatcagcgagcgcaaggccagcgaacagcgcatccaccgcctggcctactacgacgccctgacccacctgcccaaccgcacgctgttccaggaccgcctgcacaccgcgctgcagtcggcggaacgacagaagtcttgggtggtgttgatgttcctcgacctcgaccgcttcaagccgatcaacgactccctgggccacgccgccggcgaccgcatgctcaaggaaatggccacgcgcctgctgggctgcgtcgccgaagacgacaccgtggcgcgcatgggcggcgatgagttcaccttgctcctgcaaccacgggtcaaccgtgacatggcactcaaccgcgcgattcatgtggccgagcagatcctcgccagcctggtgaaacccttcgtgctggagggtcgtgagttcttcgtgaccgccagtatcggtatcgccctgagcccgcaggacggcaacgaactgagccagttgatgaaaaacgctgacacggcgatgtatcacgccaaggaacgcggcaagaacaacttccagttctaccaggccgacatgaacgccagcgccctggaacgcttggagctggaaagcgatttgcgccatgcgctggaccagaacgaattcgtactctattaccaaccgcagttcagcggcgacggcaaacgcctgaccggcgccgaagccctgctgcgctggcgtcatccgcgccgcggcctggtgccgccgggagacttcatcccggtgctggaagagttgggcctggtggtggatgtgggcgactgggtgatcagtgaggcctgtcgtcagctcaagacctggcaccagaacaaggtgcgggtgccgaaagtctcggtgaacatctcggctcggcaattctccgacggccagttgggtacgcgcatcgccaccatcctcaaggacaccggcctaccgccggcgtgcctggagttggagttgaccgaaagtatcctgatgcgtgaggtcaacgaggccatgcagatcctcgacagcttgaaaaacctgggcctgagcattgcggtcgacgacttcggcaccggttactcgtcgctcaactacctcaagcagttccccatcgacgtgctgaagatcgaccgtaccttcgtcgacggcctgccttctggcgaacaggacgcgcagatcgcccgcgccattatcgccatggcccacagcctgaacctggcggtaatcgccgagggtgtggaaacccatgagcagctggatttcctgcgtgagcatggctgtgatgaagtgcaggggtatctgtttggacggccgatgccggcgaaccggttcgaggcgcagttcagcaatgatgcgctgttcatgttcgactgaaattctgcggtgaaaccactggcctcatcgggggcaagccccctcccacattatgatctgcgaacacattcaactgtgggagggggcttgcccccgatcaggcactcgcagccaccgcctatccccagatgagctccacttgtccgcgacatgatgtcctttcatatgccatctaaaacccattgggttagaatgccctccttttctgcccccgatccttgaggaccgccatgttcagccgtgatttgactattgccaagtacgacgccgatctcttcgccgccatggagcaagaagccgtgcgccaggaagagcacattgagctgatcgcttcggaaaactacaccagccctgcggtgatggaggctcaaggctcggttctgaccaacaagtacgccgaaggctacccaggcaagcgctactacggtggttgtgagtacgtcgacgtggttgagcaactggccatcgaccgtgcaaaagaactgttcggcgccgactacgccaacgtccagccacacgccggttcccaagccaacagcgccgtgtacctggccctgctgcaaggcggcgacaccatcctgggcatgagcctggcccacggcggtcacctgacccacggcgccagcgtttcctcctccggcaagctgtacaacgccgttcaatacggtatcgatgccaacggcctgatcgactacgacgaagtcgagcgcctggcggttgaacacaagccaaaaatgatcgtggccggtttctctgcctactcgcagatcctggacttcccacgcttccgcgctattgctgacaaagtcggtgcctatctttttgttgatatggcccacgttgccggtctggtcgccgctggcgtctacccgaacccggtgcctttcgctgacgtcgtgaccactaccacccacaagaccctgcgcggtccacgtggcggcctgatcctggctcgcgccaacgccgacatcgagaagaagctgaactccgctgtcttcccaggcgcccagggtggcccgctggagcacgtgatcgccgccaaagcgatctgcttcaaggaagcgctgcagcctgagttcaagacctaccagcaacaagtggtcaagaacgcccaggccatggccagcgtgttcatcgagcgcggctttgacgtagtgtctggcggtaccgagaaccacctgttcctgctgtcgctgatcaagcaggacatttctggtaaagatgctgacgctgccctgggcaaagccttcatcaccgtgaacaagaactccgtgccgaacgacccacgttcgccgttcgtcacctccggcctgcgcttcggcaccccggctgtgaccactcgcggcttcaaggaagcagagtgcaaggaactggctggctggatctgcgacatcctggcagacctgaacaacgaagccgtgatcgacgcggtacgtgagaaggtcaaggccatctgcaagaagctgccggtgtacggcgcttgattgcagttgcttgaataagaagcccggctgaagagccgggcttttttatgccaattccagtttgaaatacagttaattgtgggagggggcttgcccccgatagcagtgtgtcagtcacagagttatctactgacacaccctcatcgggggcaagccccctcccacatttgattgtgtttcaagtcagggttggtagaccttggcaaaaccttcgcgaattttgtcttcgggcaactcatcggcaatgaacacgatcacactctctcgcacctcgccttcggcccattcggtatcccaatcgaaaccgtagagtttcagcacgccctgaaacaccatgcgccggtcttccccggcaatgttcagcacgcccttgtagcgcagcagttgcttgccgtggtcttccagcagttcgttcatgaactcactgagtcggtcgatatccagcggctggtcggtgcgcagcaccagactggagatacggtcgatggacggcgcggcgcgcaccgggcgcaggctcatgcccgcgttgaggttgaagccgcgcacatcgagcagttcggctaaatcaatcttgccgtgctcgaccacgcgaatcggcgcacggcggttgatgcgggtcaggcgttcgctgagtgcgtcgaaggtggcgtcgtccaccaggtcgcgcttgctcaccagcaggcggtcggcaaagccgatctgggcctgggcgatggtctgggtcaggtggtgctcggcgtgggccgcgtccaccagggtgatgatgccgtcgaggatgtagcgctcacgcaattcctcgtcgatgaaaaaggtctgggccaccggcgccgggtcggccaggccggtgcactcgatcaccagacggtcgaaggcgatctcgccgctgtccaggcgctcgagcagcaggtacagggctttggtcaggtcggtgtggatggtgcagcacacgcagccgttggacagggtcatgacttgcaccggctctgcgcccaacagctgggtgtcgataccggcgtcgctgaattcgttttcgatcacggcgattttcaggccgtgctcggctctgagcaggtggcgcagcaaggtggtcttgccggcgccgaggaagccgctgaggacggtgaccgggatgggagaggacaaaatattctccttgaaggaacacagaaacaaatgtgggagggggcttgccccctcccacaggggagttgcgttaactcaacagcacttgggcccacccttgccgccgtaacgggcttcctggcgttcccggaagaacgccttgtagtccatcaccggcttgtccgggtgtttggtttgcatatgctcgacgtaggtgtcgtagtcgggcatgccgaccatcaggcgcgcggcctgaccgaggtatttaccgaggcgactgatgtcattgaacatggttgcaaccctcgattacgcgtccggtacggcctggaacggggcttctttatccgtacgttctttgttgccccaggcggcgacgccaaccttgagcgcatagaacaggatgctgaacaccacgaacaggaacagcgccgtcagcgttgcgttggtgtaggcgttgtagatcacgtgctgcatctggtcgatgctcttggccggggccaggatctggccgttggccaatgcatcgctgtatttcttcgccagcgacaggaagccgatcgccgggttggcgtcgaacagcttgatgaagcccgcggtggtggtgcagatcagcagccagacggccggcagcatggtcacccagatgtagcgttggcgcttcattttgatcagcacaacggtagccagcatcagcgcgatacccgccagcatctggttggagataccgaacagcggccacaaggtgttgatgccgcccagtgggtcgatcacgccctggtacagcaggtaaccccacatcgccacgcagcctgccgttgcaatgaggttggcggtccacgactcggtgcgtttcagcgccggcacgaaagagcccagcaggtcctgcagcatgaaacgaccggcacgggtgcccgcatccaccgccgtcaggatgaacagcgcttcaaacaggatcgcaaagtggtaccagaacgccatggtgttttcacccggaagtacgctgtgcaggatctgtgcgataccgaccgccagggtcggtgcaccgccggcacgggccaggatggtggtctcaccgatgtcacgggccacggcttgcagcgcctcaggcgtgatcgcaaaaccccagctgctgacggtttgcgccacggcaaccacatcaccaccgaccacggcggccgggctgttcatggcgaaatacacgcccggttcgatcaccgaagcggcaaccatcgccatgatggccacgaacgactccatcaacatgccgccgtaaccgatataacgggcgttggtttcgttatccagcagcttgggcgtggtgcccgaagagatcagcgcgtggaaacccgagaccgcgccacaggcgatggtaatgaacaggaacgggaacaggccgcccttccacaccgggccggtgccgtcgatgaactgggtcagggccggcattttcagctcgggcatggtgaccaggatgccgatcgccagggcgatgatggtgccgattttcaggaaagtggagaggtagtcacgcggtgccaggatcagccacaccggcaggacggcggcgacgaaaccgtagccgatcagcatccaggtaatttgaatgccggtgaaggtgaacgctttggcccagaccggatcagcggcaatctgcccgcccagccagatcgaacccagcagcaacagcacgccgatgatcgaaatttcaccgatgcggcccgggcggatgtagcgcatgtagatgcccatgaacatcgcgatcgggatggtcgccatcaccgtgaagatgccccatgggctctcggccagggccttgaccacgatcagcgccagcaccgcgaggatgatgatcatgatcaggaagcagccgaacagcgcgatggtccccgggatgcggcccatctcttcgcgaaccatgtcccccagggaacggccattgcgacgggtggacaggaacaggaccatgaagtcctgcaccgcaccggccagcaccacgccggcaatcagccagagcgtgccgggcagataacccatttgcgccgccagtaccgggccgaccagcgggcctgcaccggcaatcgccgcaaagtggtgaccgaacaggatgtgtttgttggtcggcacatagtccagaccatcgttgttgagcactgcgggggtggcccgccgtggatcgagctgcatcacattattagcgatgaacagactgtagtagcggtacgcaaccagatagatggccacagcagcgaccacaatccacaaggcgttgatcgcctcgccgcggcgcaaggccactacgcccagggcgcacgctcctacgattgccagcaccagccagggtaggtggcgtagcaggctattattatttttcatttttgtattccagccagggtggacagaaaggacagccatccggagtttagcgctactggacttaaaggccacccccctacgttggtctagagccttctgcggacaaaaaaagcagaaaacccgggccaataatgacgcacggctacaatccccctatccccggagggtttcaccatgaccgagcaaccgtctgaccgccgtcgtttccgccgcatcgcctttgatgccaagaccgaaattcggcaaaacggccgcgaatggccagtgcaattggtggatttgtcgttaaagggcctgctggtgcaacggccggaagactggaagggcaacaaggcgctgccgttcgacgtcgacatccgcctggatcccaaggcgcatataaagatgcaagtgcgactgacccatgaggatcctgggcaactgggttttgtgtgtcagcacatcgacctggactcgatcagccacttgcggcggctgatcgagttgaacctgggtgacgaggatgagctgcaccgagagttggccgccttgctggaagtgtgacgactcagggaaatgccgtacgcgccgggaagtcgctttccgactcccagaagccggctttctgagtcgacgcagcctgccagaggccatcggcaaaacggtaggtggtgtaacgggtggcgaagtcttcgtccccatcaccgtccatgaaggacgacacttgcagcaattcatccgccccacccgcggttggcgtcgccgcctgccaggcggccttgcctgtctgggccagggtcagtggcttgatcttgccgtcggtgcctttgtagtccatcggtttgagttgttgcttggcgggcattaacaactgcgtggccgggccgctatagctacccatcggcgcggtctggtcgatgaccaggaaatacaccgtctccggcaagcccttgagcggggctttcttgacctcggccaacgggtaaccgaggtcttcatgggcgatcacgtcgccggaggccgacactaaccggacctgggcttccaacaacggtttttccaccaggtcgccgggctcgtcgaacgaatcttcgtccaacccgttgccccaactgtccttgtgcaactgagcgctgatgcgttggtcttcgagcacctgtagaacgctgccgtcatccgttgccagcttttgcgccagacgatatccggcgggcaactcggcccacgccaaagcgggcaacccggccaaggcgacaaacagggcgactgcgccccagcatttcgatggttgcatggcattcatccctgatttattcgaacagtgcatccagcgcctgctccaggcgcgtgaccccaataatttttatgcctggcggcgactctttcggcgcattgcccttgggcacgattgcgcgtttgaagccatgcttggccgcttctttcaaccgttcctgaccactcggtaccgggcgcacttcgcccgacaggccgacctcgccaaacaccagcaggtcgtgaggcagcggtttattgcgcaagctcgacatgaccgccgccatcaacgccaggtcggacgccgtctccagcaccttgaccccgcccaccacgttgaggaacacatcctggtcatgggtcggaatgccgccatgccggtgcaataccgccagcaacattgccaaccggttctgatccaggcccagggtcacgcggcgcgggttggccaggtggctgtcatcgaccaacgcctgcacttccaccagcatcgggcgggtgccttcccacgttgccatcaccacactgcccgggacttcttcctgggcacgcgtcagaaagatcgccgacggattggagacctctttcagtccccggtcggtcatggcgaacacgcccaattcgtttaccgccccgaagcggttcttcaccgcccgcagcaaacgcaggcggccatccgattcaccttcgaaatacagcacggtgtcgaccatatgctccagcacccgaggcccggccagcgcgccttctttggtgacgtggccgaccaggaagatcgccgtgccgctctgcttggcataccgcaccagcagcgccgcgctctcgcgcacctgggacacgccgcccggcgccgattgcaactgctcggtgaaaatggtctggatcgagtcgatcaccatgaccttgggtttttcaatacgggccgtggcaatgatgctttcgatgcaggtttcggtcatgacccgcagctgatcctggggcaaccccaggcggcgggcgcgcatggccacttgttgctgggattcctcgccggtgacatacagcgccggcatgcggctggcgatgctgcacagggtttgcagcaaaatcgtcgatttgccgatgcccgggtcaccgccgatcagcaccaccgagccgtccaccaggccgccgcccagcacgcggtccaactcgccggatgccgtggaaaatcgcgggatttcttccacgctgacttcagccagggtcttgatctgcgcctgctgcccggtccagccggcgcgaccggtgggggccgccgcaccgccactctcaatcatggtttcagtcagggtgttccacgcaccacactcggagcactggccggcccacttgggaaaggtcgcgccgcactccgtgcagccgtacatgcgcttggcctttgccatttgagaacctccaaccgaaaaaccgcgatgatagctcagcgcgacgccggggtccggatttcaccactggccaagcgtgaagcggtgttaccgaccgggtcttcggcattgagatcggcacctttggccttgagttcatccagcagctcgacacgcttgaacagcccggcgtacatggcggcggtctgtccggcaccgttgcgctggtcggggttgcagtcggtggccaacaggcgctgggcgattttcagctcgcctttgaagatcgcgcccatcagcgcggtgttgccgcgtttgtcctgcacgcaggcgtcggcaccggcgttgagcaagcgctccacgaacggcccctggccgtggtaggcggcgaggatcagcgcggtgtagcccttgtcgtcctgggtgttgaggctataaccggcgtcgatgaaggtgttgagcatgtccaggtcaccacggcgggcggcgtcgaagtagtagtcctgcaactgggccttgagcgctaccgggtcgggagtctcggcatgggcgacaaaggccagcatggtcatcagcaagccgatagaaattcgcatggtttttctcctgccaggggtcgacgcccgtatcggggcgtcgaccgtaaccaacggatcagtcggtcagtttttccgccagcgccttcacgcgcgccaggtcacccttggccaccttggccacgccggtgccgtattccgggtcggctttgtaaaggaacgacaggatgatgtgcttgctctcgtcatcggtggtcgccagcgagccaccgaagttttcgatcaagtcctgacgctctttcttgctgtaggagcggtacaagtcacctgcctgcttgaagttctgctcacgctggatcttcgcctgctgggtgctgcctgacagcgccgactggctgtagcgcgcggtttgcggttcttcccgtggcaacaggcggcttggctggtagttcacaccggtggtggtcttgccgaagttcatcgcgccgtcctggttgccgttgttgacggtcacccgtggcgcgttgatcggcagttgcagggcgttggcgcccaggcggtacatctgggtatcggcgtaggagaacacccggccttgcagcaggcgatcttccgacggctcgatgcccggcaccaggttggccggggccatggccacttgctcggtttcctggaagacgttggccgggttgcggttcagcaccatctgtccgaccttgcgctcgggcacattcggccagatcttggtggcgtccagcgggtcgaaatcgaacttggccaggtcttcaggcttgagcacctgcacgtacaggtcccacttggggaagtcgcccttgttgatgtgggtgaccaggtcgttggtcatgtggctgtagtcgcggccctgcacttcgatgacctgcttgggatcgaggttcttgatgccttgcaggctcttccagtggaacttgacgtagtgcacttcacccttggcgttgatcagcttgtaggcgtgcacgccgttgccgtccatctcccggtaactggccggagtgccagagtcggagtacagctcggtcagcgtacgggtggcttcgggcacgtgggagaagaagtcgaagcgacgcgagtcgtcatccaggttggtacgcgggtccggcttgaacgcgtggaccatgtccgggaacttgatggcatcgcggatgaagaacgtcgggaagttattgcctaccaaatcccaattgccttcggccgtatagaacttggtggcgaaaccgcgtgggtcacgcagggtttccggggagtggttgccgtggaccacggcggagaagcgcacgaacaccggcgtcgcctcgccggccgcaaagaccttggccttggtcaggtcgctaaggccgtcagtgacggtgaaggtgccatgagcgccggtgccacgcgcgtgtacgacgcgctcggggatgcgctcgcgatcgaaacgctgcaatttctgaataagctgcacgtcctggagcagtaccgggccattggcgccggcggtttgcgagttctggttgtcgccgacggcggcaccgttgtcgcgggtcaggttggcggcgtgtaccgacagggagagcaggctggcggtcaccagtaccagcgcggatcgcgctgtaacgggcccacggctcattgggttgttcatcgaggtttcctctggtttttttagtgcacattcagttgtgcttgccagaggctagtgacccgcgagtcagaagataaatagaaaagccgtaccaacccgatagataaaataatctggtaagtcgctgatttggcgagtatttcgcgcgcgattgatggcactttgcaaactatttgcgttttaatgtgtcgataaaagctaacagtgttaacggttgtttcaggcaagccctctacgactgacttacactgggtaccacccttctcatctgtaacaaggaataacctatgggcgtgatcagtgagttcaaggccttcgcggtcaaaggtaatgtggtcgacatggccgtcggtattatcatcggcgccgccttcggcaaaattgtttcctcgtttgtaggcgatgtggttatgccgcccattggtctgttgatcgggggcgttgacttcggtgacctggcgataacgctcaaggccgcccaaggcgatgtgcctgcggtggtcctggcatacggcaagttcatccagagcgtcatcgactttgtgatcgtcgcgtttgcgattttcatgggtgtgaaggcaatcaaccgcctcaagcgtgaagaggccgtggcaccaagcctgccgccgacgccgaccaaggaagaagtgttgctgggtgagatccgcgatctgctcaaggcacagaacgacaagccgctctaatcgagccggcacgaaaaaggcgcctggtgtgaggcgccttttttattaccagtagttttccaccgccacctggccaggtcgacggctcaagctcaggttcatatcgcgctgcttgaacaactggcgtgtgtcatcgaccatctgcgggttgccacagatcagcacgcgggaatgctccggggtcagttcgacgcccgccgcgcgttccaactcgccattttcgatcagcgtggtaatgcggccgttcaacgcaccggggtgttgttcgcgggtgacgatggggatgtaggtgaacttgtgcgcgtattcggccaggtactcgcgttcgcccaacgtgttgatcagcgcttggtaagccaactctttggcttcgcgtgcgctgtacaccaggatgatgcgttcgaatttctcccagacctcgaagtcctgcaggatcgacaaaaacggcgccaccccggtgccggtgcccagcatccaaagatctcggccgtcgacgaaacggttcaaggtcaggaaccccgtggcctggcgctccaccatcaaggtatcgcccacacgcagacggctcagttcgctggtgaactcaccgtccgggacgacaatcgagaagaagtccaggtgctcatcaaacggcgaggacaccagggaatacgcacgccataccgtgctgccatccgccttggtgacccccaggcgcacaaactggcccgcggtaaaacgaaagcccgggtcgcgggtggtgcgcaaggtaaacaggctgggggtcagcgattgcacgtcgagcaaggtctggcgggtaaatttctcagcactggccgtcatggggggctccgttctacaggtgccctagtgtcgctcaaagtcacgtgcggaaacacctacgataggtagtggcatcacgcaagcacacagtgatggcaaattaatttcaccttcgatcaattcgctattagctataaaaactacctcatatagccgctgttagtgggttgttacaggggcttcaaccccctaataagtcgcgggtttcaaacttgccacttgcttggctaactaccttcctgtggaaaaattcttaaaccttacagcgcaagaacgaaattttcctctcgccatgtagtacgtgtcctacactgattttcgtgcaacgttggggataaaggacgtaccccaagtcacggagatcccatggagatttacccatgcttaactggcgaaatacacgactccactcgctcgaaggtgaggacgaggtcaccagcgtattcgaaatgaccatcaacaaggcctacgaactcggtttccaatactgttccttcaagatgagctctcaactcaccaacggtcaaaacaaaccggtggaactgacgaactatccaattgaatggaaaaatctatacaaccaagcgcactacttcgatgtagaccccgtagtgaaacattgtagggagggcgtgttaccccttgtctggaaggaggaaacattcaaagacgtgcccagtctttggtctttggccgctaccttggaggtacacaaggcgttgactatcagcgtgcatgatttccggggggtcttcagcatgctgacgttgagccgtggcaagggtgacatcagcccggaagaattgtatgaaaaagcaggaatggcgctatggctctgccacgccatgcatgccgtgctggcgcagaagtttgccgaaaaacccagcgtcaaccctgcaagcaaattgacccctagggaaacggaagtccttatgtggtctggcatgggcaagaccgcagcagatatcgccgccatcctttgtttgtccgagcgtacgataggctttcatatgaacagtagcttcaagaaactgggcgtcaacaacaaaatcgccgccgtgcttcgcgccgctcgggccggcatcatttaaaacactccatgtaatccccttgaaaaaaacgtaacatttaccgcccattctgagtgctgagcagccccttccggggagtcgcccgtggttcactcagacggttcggcaaccgctgtcgaacacccatcgtttacccagagtctcccccgccatgcccctgctcgaaagcccctttgcccagctcgatctgatccgccagccagagcaacacaacgatccgctgcaagccttcgatgccgccgacgagtacctgctcagccatttggccgaacagcagccggccgcacacacccgggtgctggtgctcaatgacagcttcggcgcccttgccgccagccttcagggccgggtgcaggtcacctcaagtggcgactcgttcctggcggcacaaggcctggaaaaaaacctggtgcgcaacggcaaggcgtttgacgctgttccgttcatcccggccagccacctccccaccgggccgttcgaccgggtgctgatccgcgtacccaaaaccctcgcgctgctggaagaacaactgatccgcttgcaaggccaactggccccaggcgccgaagtgatcgccggggcaatgatcaagcatttgccacgggcggcgggcgagttgctggagcgttacattggcccgatgcacgcatcgctcgcggtaaaaaaagcacgcctgctgatcgccaccgcgcaagaccgccccgttgccgtctcgccctaccccacccgctacgccctcgacgcaccggctatcgagttgctgaaccacgccaacgtgttctgccgtgaaagcctggacatcggtacccgcgcgttcctgccccacctgccgaaaaacctgggcagcgcccgcgtggcggacctggggtgcggcaacggcgtactggcgattgccagcgccctgcacaaccccgaagcacactacaccttggtggacgagtcctacatggccgtgcagtcggcgctggagaactggcaagccgccctcggtgaacgtgatgtggtggtgcgtgccgccgacggcctggccgggcaagagccacaatccctggacgtggtgctgtgcaacccaccgttccaccagcagcaggtggtcggtgatttcctcgcctggcgcatgttccagcaggcacgggaagcactggtggtgggcggcgccctctatatagtcggcaaccgacatttgggttatcacaccaagctggcacgcctgttccggggtgtcgagcaagtcgccaccacgccgaagttcgtgatcctcaaggcgcgcaaataaaaaaaccctgcttctctcgcaaaaagcagggctggaaagccgggccgcaaagcccggatcgggatgtcagtgggtggtcaggccggccgcattcataaacatgcgcatcaggctggccacgacgaacagggccagcacactgccagtccagatcatcgccagccaccccaggcgccgccacaatggctgcttctcggcctgttcaatctcgtgcaacgaaggtttgccggacatggaacgaccctcctagtgataaccgtcttcgtgggtgaccttgccgcggaacacgtaatagctccagaaggtatagcccaggatgaacgggataatgaacagcgtacccaccagcatgaagccctggctttgcggcggcgcggcagcatcccaaattgagactgacggcgggatgatgttcggccacaggctgatgcccaaaccgctgtagcccaggaagatcagcaccagcgtcagcaggaatggcgtgtagtgtgcgttacgtgccaccgcgcggatcaacccgtacatggtcaccagcaccaggatcggcactggcaggaaccagaacaggtttggcagggtgaaccagcgcgaggcgatttccgggtgcgtcagcggcgtccagatactcacgatgccgatcaccgccagcaccacgaaggccaatggccgcgccaggttgtgcattttctcctgcaacgagccttcggtcttcatgatcagccaggtgcagccgagcaacgcataagccacgatcagcgccacgccgcagaacatcgtgaacggcgtgagccagtccagcgaaccgccggcaaactggcgattcaccactggaatgccatcgatgaacgcacccagcgccacgccctggaagaacgttgccgccagcgagccgccaatgaatgccttgtcccacaggtgacgcttgtggtccttggccttgaagcggaattcgaaggctacaccgcggaagatcagcccgatcagcatcaggatcagcggcaggtacagcgccgacagcaccaccgaataggccagcgggaacgcaccgaacaacgccgcgccgcccagtaccagccaggtttcgttaccgtcccagaccggggccacggtgttcatcatcacatcacgatcggtcttgcccgggataaacggaaacaggatgccgatacccaggtcgaaaccgtccatgaccacgtacatcatgatgccgaagatgatgatcacggcccagatcagcggaagatcaatacccatctcaatgccccttgtgctggatgtgggtgtggtcgtcatcgctgccatcatcggcggcggacaacggacgggccggcgtacgtttctggccagggccaccgtgggtgggctcgctgccttcgtgggtctgaggccctttgcgcaccaggcgcatcatataacccaggcccgcaccgaacagcgcgaagtacaccaccacgaacaacaccagggtgatggtcatctgcgccaggctatgcccggaggacgcgtccgccgtgcgcatcaagccatagaccacccacggctggcggccgatctcggtggtgaaccaacccgcaagaatcgcgatcaggccggacggccccatccacaacgccaggtacaggaacggcttggacgtgtacatcttgtcgccccggcgcagccagaggctgaataggccagtgaagatcatcaggaagcccaggccgaccatgacccggaacgaccagaatacgatggtcgagttggggcggtcttccggtggaaactccttgagcgccggcacctgtttgtccagggagtgggtgagaatcaggctgcccaggtaggggatttctaccgcgaacttggttttctcggccttcatgtcgggccagccgaacaggatcaacggcgtcggttcgttaccgatgttttcccagtggccttcaatcgcggcaattttcgccggttggtgcttcagggtgttgaggccatggaaatcaccgatcaccgcctggatgggcgcaacgatcagggccatccacattgccatcgagagcatcttgcggatcgccgggttgtccttgccgcgcagcaagtgccaggccgccgaggaaccgacaaagaacgcagtggccacgaaggctgccgtggccatgtgcgccaggcgatacgggaacgacgggttgaagaccacggcgaaccagtcggtcgggatcacccggccatcgatgatttcaaagccctggggcgtctgcatccagctgttggaggagaggatccagaacgtggaaatcagcgtacccacggccaccatcacggtggagaaaaagtgcaggttgcgcccgaccttgttccagccgaacagcatcacgccgaggaaaccggcttcgaggaagaaggccgtgagcacttcgtacgtaagcagcgggccggtgacggcgccggcgaagtccgagaagcggctccagttggtgccgaactggtaggccatgaccaaaccggacaccacgcccatgccgaagttgacggcgaagatcttcgaccagaagtggtagaggtcacggtaggtgtcgttgtgggtcttgagccacaagccttccagcaccgcgaggtaactggccaggccgatggtgatcgccgggaacaggatgtggaaagagatggtgaacgcaaattgaattcgggcgagatcgagcgcctccaaaccgaacatatgtcttcctctgtcaggtaataccggctgctggcgggagcctgcacccactgcccccacggatatggagcctggcgaatttcgattcgtttctttttttagccaaccacgtagggaatctggccctgaggccgccaggccgatgcccgggcgggcattgatctggatcaagcattgctgaaagagtagtcccattttcaagattgaactgtgtggtcttttgccgcgtgacagactgcctcagctcagttgttgcaactatctgttacaacttaatgataatctcggtgctccctccggccttgacctgaactccccgatgcctagtgaacccgcgttgctgttgcgtcaccaccgccctttcatcgcgttctggctggcgcgtatcttcaccgccagcggcttccagatgctcaccgtggccatcggctggaacctctaccaactgaccggcaatgtgctggatctggggttggtcggcctggtggagttcgtacctcgcgtgctgttcatgttgcacaccgggcacgtggccgaccgctatgagcggcgcaaggttgccgccatctgccagaccgtgcaggcgctgattgccctgagcctggccatcggcggcctgaccggcaacgtgacccgtgagatgatctttattctcgcctttctgctgggtgctgcgcgctcctttgaaatgccgaccacccaggcgttgctgccaagtattgtgcccagcgccttgttcccgcgagccgtggcctcatcgcagtcggcccagcaattggcgaccatcgtcgcgccggccctcggcggtttgctctatgcgttcggcagcgtgtgggtgtatggcccaacggtggtcctgtacctcattgcctgcgtgctgaccctcaacctgcccgcccgccagacgccgttgaacaaaggcaaggccaccctggattcgctgctggccggcatccgttttatccgcagccgcccggacatcctcggcgccatctccctcgacctgttcgctgtgctgctgggcggcgcgaccgcgttgctgccggtgttcgccaaggacatcctgctgaccggcgcctggggcctgggcctgctgcgctcggcgccggcggtgggcgcgttgttgatgtcattgtggctggcgcggttctcggtggaccgccatgtgggccgcgttatgttcactgcggtaggcgtgttcggcgtggcgaccatcgccttcggcctgtccacctccttctggttttccctggcggtgctggtggtgctgggggcggcggatatgatcagcatggtcatccgtgcgtcgtttgtgcagttggaaaccccggatgacatgcgcggccgcgtcagtgcggtcaatggcctgtttatcggcgcatccaaccagttgggtgagttcgaatccggcattaccgcccactggttcggcaccgtgcccgccgtggtcatgggcgggatcggtacgctggtggtgacgggcgtgtggatcaagctgttcccgaccctggcgaatcgggatcgcatgcacgtaccggtggaagagcctattcaaaaaaccagcgtataacccatgtgggagggggcttgcccccgatagcgccatgtcagtcacagcatcgttgactgacaccctccatcgggggcaagccccctcccacacttggataatcagtgctggctagaccgtgtcagagcaccttatcgagggtgatgggaaattcccgcacccgtttgccggtggcgtgataaatcgcgttcgccaccgccgccgcaacaccgacaatgccgatctcccccacgcccttggacccgagggcgttgacgatctcgtcatgttcctcgacaaacaccacgtcgatctcgccaatgtccgcgttcaccgggatatggtattcggccaggctgtggttcatgaagcgccccaactgatgatcggtctgggtttcttcatgcagggccatgccgatgccccacaccaccccgccaagaatctggctgcgggccatcttggggttgaccacgcgcccggcggcaatcgcactgaccacccggcggaccttgatggtgcccaggtcctcatccacctgcacctcgacgaagacggccgaatgggtggcggtgctgtagccctcgcgttttttgtcgggctcgctgtcgacctgcacttccaacgcgtcttcgccactgtccttgaccaactgcgccaacgacacactcacgtcaccggtgtgcaagtggccgtcttcaaagcgtacggattctgcctgcgtgaagaccgggtatgtctgccgggcaatggccagcagtttgccggtcaacgcttcgcaggcttgctgcaccgccgtccccaccgaggacacggtaaacgaaccgccctgcagtggcgcggtgggcagtgaggaatcgcccaacaaaaaggtcacgtcgtcgaccgccacgccactggcctgcgccgcaatctgggtcatcaccgtgtaagtgccggtgccaatatcggtggtggcgctgctgaccgtcagtttgccctgcgcgtcgatccgcgccttggcactggccttcatctgcatggcttcccacaccccgccggccatgccccagccgatcaactggcggccgtcgcgcatgctgcgcggttccgggttgcgctggctccagccgaaacgctcggcaccttcgcggtagcactcgcgcagggccttgcttgaccagggtttgtcttcgttctggttgcgctcggcgtagttgatcaatcgcagttgcaccgggtcgatccccagggcgcaggccagttcatccatggcgcactccaggccaatcaccccgagggcagcgccaggcgcacgcatgtccaggggcgtgaacacgtccaggggcaccaggttgtaggtcagttgcacgttgtcgcagtgatagagcatgccgctccactccaccacatgttcgctgaaatcctcgaagcgcgaggtctggccgatagcggtgtggcccagcgcgagcaaacgaccgtcggcggccgcgcccatttgcaaacgctgcagggtgcgcgggcggtagccgaaggtaaacatctgttggcgagtcagggtaacgcgtaccgagcgtttgagcgccagggacgccatcaccgccagcggcaattggtactgcgggcgcaaaccggagccaaacgcaccgccgacgaacgcggcaaagatgcgcacctggcttttatccaggccgaagactttttgcacataggcctggcagttctgcgggccctgggtcttgtcatggatatgcagggtgccgtccggctgatacagcacggtgctggcgtgcggctccatcgggttgtgatgttcgacgggcgtgctgtagtgcaggtccaggctgacggcggcgccgctccactcggcctggaagttgccgcgcggcttgggcggggtttgcggcgaggcataggcctgttcctgcatggccagcaggtcggtttcgaaggcttcggttgcgtactcgatctccaccagggagccggcatgccgcgccaattcgaggttgtcggcgatcaccaaggccaggggttggccgctgtacagcacacggtcgttgtacagcgggcggaacggcgagccgtcggccgcgtcgtcgtcctggaaagcgtcgtcgtagctggcgattcttggccggttgaggtgatcaattaccgccaccacccccggcagcgccaacgccctggaagcgtcgatacgcagcacccggcccttggcgacggtgctggacaccacgctgccatgcagcaagccatcctcgggaaactcaccggcgtaacgcgcctggccggtgaccttgagcagaccgtcgacccggtccaagggtttgccgatggcagtcatgggcgttctcctgcgacagcggcatcactcagggcacgaatgatgccccggcgcgccagcttgattttgaagccgttgtgcgccaggggttcggcgtcttgcagcagggcgtcggcggcttggctgaaggtttcgcggctgacgacctggccgatcagcccggcttccaccgcgcggtcacgccagggtttgtgggccacgccgccaagcgccaggcgtgcgtcgacgatgacgtcaccgtccagctcaagggctgcggctacagataccaaggcgaaggcgtaagaggcgcggtcgcgaatcttcaggtagttgctatggcttgccaggttgtcggcaggcagttcgatggcggtgatcaactcatcgtcggccagcaggttgtcgcgttgcggcgtgtcgccgggcaaacggtggaagtcggcgaactcaatgatccgcgcaccgccacggccctcgacatgtacccgcgccgccaatgccgccagggcgacacacatgtccgaagggtgggtagcaacgcactgctcactcgcccccaggatcgcatggattcggttcaagccggtgcgcgccggacagccgctgccgggctcgcgcttgttgcacggcaccgtggcgtcatagaagtagtagcaacgggtgcgttgcagcaggttgccgccagtactggccatattgcgcagctgcggcgaggcaccggcgaggatggcctgggagagcaacgggtaacgctgttcgatcagcgggtgccaggccaagtcggcattgctcaccagggcgccgatcaacagtcctccgtcggtcgtctcctgaatgtcatgcaacggcaggccggtgatatcgatgaggtgctcagggcggctgatgttttctttcatcaggtccagcaggttggtgcccccggcgataaagcgcgatgcagcgctgctgaggtgcacggcctcctgtacaccggtcggccggctgtaatggaaggggttcatggtttgccctccaggacttcctcgatagcatcgcggatattgctgtaggcgccacagcggcacaggttgccgctcatcaattcctggatttgcgcggtgtcatgggcgcggccttcgttggccaggcccacggcggaacagatctggccgggggtgcagtagccgcattggaaggcgtcatgcttgataaacgcctgctgcatcgggtgcagttggtcgccgtcggccaggccttcgatggtggtcagctcggcgccgtcgcacatcaccgccagggtcaggcaggcattgatccgcttgccatcgcgcaacactgtgcaggcgccgcattggccgtggtcgcagccttttttgctgccgacaaggtcgagttgctcgcgcagcaggtcgagcagtgtggtccagggcaacacatccagttggcgatcctggccgttgaggctcaggcgtatcgagtgactgacgaacggttgggccgccgcgccattgggggttgcgctcataaacacctcacgggttggtggacatccgcggcgttcagggaagtcgccgtctcaggggtacgacttcccggggtaatgagcgttcaaggtgattgatcagcggatattgagcaatgtcgtcagggtgttctgcggagggttgatcgaggagttgctgtattggaaccagccctgggcctccacgttcaggtcaaacacatagatgtagcccatcagcgtgccggccccgttgcaggcctcgctgatgttgcccacctggcagaccgccgtgcgctgcccattgagctctgcgccatcaaagcggcctatggggttgttgcccaggccgacctccatgaccgacactttggtaggcccacggtgcgtgcacatctgcgtgctttgtgcgcgctccgggatggtttccgtgcacgccgccgattcaaccttgaacacccgcacttcgctcaacggcggtgcagtcgcgccccaggccggtgctgcgccgagcaacaggctgatacaggggatcagggctagactccacgggctggcgtttttcatgttgcagatgaccttcgtttaaacgtcggcgcagtatgcctcaaggcctcggctgctggtatgatgcgccgctttttccgatcctctctgaaaccaaaggcgcttggcgcagtttgtgctttgacttagaggtcaacaaatcacgacgccacagagcgtcacagggagcaggcatgctggaaaagctgtttcaactcaaggcacacaacaccaacgtgcgcaccgagatcctcgcgggcatcacgacattcctggccatggcctacatcctgttcgtgaacccgagcatcctcggcgagaccggcatggacaagggcgcggtgttcgtcgcgacctgcctggcggccgccatcggttcgaccgtgatgggcctgatcgccaactacccgatcgccctcgcgccgggcatgggcctcaatgccttcttcacctacaccgtggtgctgcacatgggccatacctggcaggtggcgctgggtgcggtgtttatttcggcggtgttgttcttcctgctgtcgatcttccgtatccgtgaatggatcatcaacgccatccccctgcccctgcgctcggcgattgccgccggtatcggcctgttcctggccttgatcgccctgcacaacgccgggatcgtggtcagcaaccccgccaccatggtgggcctgggcgacttgaaacaaccggcaccgattctcgccaccctcggttttgtgctgatcgttgccctggaagccttggccgtgcgcggcgcggtgttgatcggcattctcgcggtgaccatcgtttccatcctgctgggcgttacgccctttggcggcgtgacgtcgatgccaccgtccctggccccgaccttcctgcaactggatatcaagggcgcgctggatatcggcctggtcagcgtgattttcgccttcctgttcgtcgacctgttcgataactccggcaccctgatcggcgtggccaagcgtgccggcctgatgggcaaggatggccacatgccgaaaatgggccgtgcgctgatcgctgacagcaccgccgccatggccggttccctgctcggcacctcgaccaccaccagctacatcgaatcggctgcgggtgtgagcgccggtggccgtaccggcttgactgccatcgtggtcgcgatcctgttcctgctggcgttgttcttctcgccactggccgccagcgtcccagccttcgccaccgcgccggccctgctgttcgtggcggtgctgatgacccagggcctggccgaaatcgactgggacgacattaccgttgcagcgccggtggtgatcaccgccctggcgatgcctttcacctactccatcgccaacggcatcgccttcggtttcatcgcctggaccgccatcaagctgctttcgggccgctatcgtgagctgaacccggcgctggtgattctgtcgattctgtttgtgatcaagctgggctggttcaacgcatgacttttgacgccgcacgctacaccgctcaactgcaagacaaggtcacacgcttgcgtgacctgctggcaccgttcgacgcgcccgagccgcaggtcttcgactcgccgctgcagcacttccgcctgcgcgcggagttccgcctgtggcgcgaaggcggtgagcgccactatgcgatgttctcccaggacgacaagcgcacgccgatcctgatcgaagagttccccatcgccagccagcgcatcaaccagttgatgccgcagctcaaggccgcctggcaagccagcgccgccctgagccacaagctgttccaggtggagttcctcaccaccctggccggcgatgcgatgatcaccctgtgctatcaccgcccgctggacgagcactggcacaccgccgccaaccagctggctgccgacttgaatgtcagcatcatcggccgttccaagggcaagcgcgatgtgatcggccatgactacgtggtggaaaaactcgacgtcggcggccgcaccttcagctaccgccagcccgaaggcgccttcacccagcccaacggcacggtgaaccagaagatgctcaactgggcctatgaagccttgggcgatcgcccggatgatctgctggaactgtactgcggcaacggcaacttcaccctgcccctggcgacgcgcgtgcgcaacgtgctggccaccgagatcagcaagacctcggtgaatgcggcgctgagcaacctcgatgaaaacgcggtgggtaacgtcaccctggtccgcctctccgccgaagaactcaccgaagccctcaacgaagtgcgcccgttccgccgcctgcacggcatcgacctgaaaagctatgaattcggcagcgtgttcgtcgacccgccgcgcgctggcatggacccggacacctgcgaactgacccggcgcttcgacaacatcctgtacatctcctgcaacccggagacgttggccgcgaacattgcgcaactgcatgacacgcacacgattacgaaatgcgcgatgtttgatcagtttccgtggacgcaccatatggaatccggggtgttattgactcggcggtaactcggcgtcctccggttgcttcttgcgcggccgcccgcccttcttgccattggcacgggcggcagcggctttggcggcgctgcttttgcgaccgttgcgcgaggcaaccaggctgatcgccaggtccatcaggggtttgctggtggcaatcaggccagtgatcgaaacgtccaggtcttgggcctcacagcacagcgcctttccgccaaagccgacctccagttgctcgaagtcctccagggaaaaccccgcgaactcgggcaggccagccaccggcagtacaacgcgactgccgtcgctgaagccgatggaaatgcagttgtcttcataacgcacagcgctggcgcgggcataaaggtgccgcgtcttgcgccctcgggctatcgccttttcaacgtcggcctcagtgagtggtttatagggtacaaccttggcttttacgattttcatagatcaatccccacgcagtctggtgcccttaccagattcaaaattgtccgttgcgctacgacatcgtgccgagcacttgcgatgacatggactccacgccgaataaccaaccctggcaccaactcaccggcgtcccaatcccaggaatgattctccagacagaccgtttgcaggtattcccaccagatcctgcgtgcccgtgccaagtagtgccgctgcatgatcgccccgcgtatttctttcaaaaccgccaggggtggctgcctccgctcaggctctacgtcccacaactccacgtccccatccagaaaactgaaacgaaaacgcgcatcccattccttgccccgcacatgcacatggggcgggcaatgctcatccctgatgaacaccgaaatcacatatcccttgtaaacgcctactctcatcgtaacccatccgttaggttattttccgccaggtaacaattttcccctgccacccgacaaccggcttcatctacccgaagctgtttcacagactagtaagcacaaaaaacccggcgaaggccgggttgtaaccactcatgccgagggctggaaatactccgccaacgcccgcagatcctgctcgctcagcaaccccgcgtaatacttcagctgaatcctcgccagcagatatgcatgccgcgcattcgccaggtcgcggcgggcagtgaacagttgttgctcggcgtcgagcacgtcgaggttgacccgctcaccgccggcaacactcttctttgtcgcagcgaccaacgccgtggcagagctgaccgccatttcataggcacgcactttggctgcgccgctggtgttgaggttgaactgcttgcgcaactccaccagcgtggccgaggtttgcgcgtccagttcatattgggcctgggacagttgattagccgcctggcgcgtggacgccgacacgccaccaccggcatacagcggcaggctgacctggatgccgaccgtattggtgtcgtacttctggttgtagctgctctccgagtcggagttggtctggcggctcgtggcgtacaagctgaccttgggcaggtgcccggcgcgtttgcgttccacttcataggaggccacgtccagggcgtggtgctgggattggagttccgggttgttggccatggccagttcgcgccaggtttcaaaacggttgggctccagcggcgggatctcgaattggcgcgtcagcggcgccagttcttcgatctgcaacggttggccgacgatggcttccaactcgcgcagggcactgtcctgggtatcctgggattcgatctcttcggcctgggccaggctcagccgcgcctgggtttccagcacatcggtacgggtgccttcgccgcctttgagcaggcgatcattgagttgcaggcgctcggcatacgcacgtttctgcgcgcggctcagctcgatacgctcctgggccagcaaggcctggctgtaggcgttgagcacccgcaccgccagttcctggctcttgccacgaaaacgctcatcagccatcaaggcctgggcggtgccctggcgaaagcgcgcgtaggcctcgtaatccagcagcggttgttgcaaggtcagggtcgacgcgtaactgcggtagtcacggtcactggtgacatcacccgccgtcacttcggattcgttgcgcgagttgttgtagctccacgataggttcggcaacagcgccgcgcggccgatcacgcggttttcttcaccggcttcacgcgcctggatcgcggcctgaaaggtcgggtcattgcgcagggccagatcgtaggcatccagtaaccccaaggcgtgcgccgaggtacaccccaaacacaagataaacagcagcgccttcattcttccaccagcgccatgtgggtgcgatccatcaacggtttgaacaggtagttgagcatcgagcgctccccggtcttgacgaaggtttccaccggcatgcccggacggatctgcacgccgtccagttgctgcatgcccgccgcgctgacctgggcacgcagcgtgtaatagggctcgtcggtgcgctcatcgacctggcggtccgccgaaaccagggtcacctcaccggccacccgtggcgtggtggattggttgaacgccgagaacatcaactccaccggcaagcccggatgcactttgtcgaccatctgcaccggcacccgagcttctaccagcagcggctcgccctggggcacgatgtccatcaacgcctggccgggcttgatcaccccaccttcggtgtacacgtccagccccaccaccaccccggacgccggcgctcgcaccaggctgttggccagttcgaactcggccgaagccaggcgattgcgcaggtcgtcgctgcgggtgcgggtctcggccaactggccgcgcaggtctttctggaagtcttcgccaagctggcggatgcgcagacgcagttcctgcacctggcgctgcaattggccgatgcggccgtagtcttcggcgatggcgccgtcgatctgggaatacaggcgctcgctgtcgagcaggcggttgcgcgggatgtaaccgtcacgcgccaactcgcgcaggccttgcagttgctcattcaacgcggcccgttgctggactttgctcgcctgcgaatcccgcgtgccgcgcaactgggcctcggcgccggcgatggtttcgcgcaggccttgttgctcggtggccagtgcctgggcacggctatggaacagttgccgttgcaggctcagcgtgccggtcgcctcaggatcgttgagcagttccgggccgaaggtgatcgccgccagcccttagctttcggcacttaaacgcgcttcgctggccagggatgccaggtactggctgcgcagggactgcatctgcccgcgcaacggggtttccttcaagcgcagcagcacctggccagcgttgaccacatcaccgtcgcgcacctcgatacgttccacgatccccccggccggatgctgcaccgtcttgcgatggcccgaaaccatgaccttgcccggcaccgccacgcccttgtccagtggcgcccacgctgcccagccgaggaacccggcaaagccgccgagcaccaacagccaacccaaacgcgaatattttttatcatccagcgccagcacattgttcggcgcatcactgatcagcacgggtttgctctggttcatgcctgttttccttcaccgaggcggtaactcatgctcagggtcgacaccggtttgctcgccgccggtgtctgccgtgcctccaacacccgtgccgtcgacccgaaggcctgcaattggccgtccttgaggatcagcaaccggtcagtcagggtcagcacgttgggcttgtgggtgatcaggatcaccgtgcggcgctgttgcttgagctgggcgatggcttggagcagggcttgttcgccgacttcatcgaggttggcgttgggctcgtccagcacgatcaacgcaggcaggccgtacagcgcacgcgccagggcgacccgctgtttctggccaccggacaatccagcaccaccctcacccaatggcgtgtcgtagcccaggggcagttgcagaatcagctcatgcacgccggccatttgcgcggcggcaagcactttgtccgcctcgacctcggcaaaccgtgcaatgttttgcgcgatgctgccggcgaacaactggatgtcctgcggcaggtagccgatgtgcgggcccaactgctgtttgtcccacagggccaggtcggcaccgtccagccgcaccttgccggccaagggtgcccaggcgcccaccagtatccgggccagggtggacttgccgcagcccgacggcccaatcacccccagcacctcgcccgccgccaggctgaagcccaaattggccagcgccggtcgacggctgccgggggcacaggcgctgatttgctcgacgctcagttgccctttgggcaccggcaagctcatgcgttcgggccgtgccgggttggcctccagcatctgtgacaaacgctcaaaggccaggcgcgccgagccccactgcttccacacgccgatcaactggtcgatggggctgagcacgcggcccatgaggatcgaaccggcaatcatcattcccggcgtgatggcgccctgcaccgcgagcaacgcgcccaggcccagtaccagcgactgcaacgccaggcgcacgcccttggaccaggcggtgacggtcgcggtcttttcactggccaggttctgctgcgccaggaacgcttggtgctggccgaaccaacgcgcgcgcaacgtggcgagcatgcccatggcttcgatggtgtcggcattgcgcaggttggccgtggcctgctggctggcgctgatcgacagttggctggccagggccatcggcgcctggctgacgtgatggttgacccacgccagcacgatcagcagcaccgcaccgaccagcgccaacagcccgagccaggggtggaacaggaagatcaccagcaggtacaccggaaaccacggcgcatcgaaaaacgcgaacaacgcctggccggtggcgaactggcgcagggtggtcaggtcatgcagcgcctgcccggccgcctgggtaccgcccttgagttgcgcttcgaacgcggcgtcatacacccgctggttcaggcgcatgtccatctgcgtgccgaggcggatcaccacctggctgcgcacccactccaacgcgcccatcaggccgaacaggccgaggatcatcagcgtcagcatgagcagggtcatctgattgcccgaggccagcacccggtcgtacacctgcagcatgtacagcgccggggcgagcatcagcaggttgatcaccgccgagaacaggccgatgttgaagaagccacttttataggccgtgagggcggccagggtttcgttgccggcgtggcgcatctggggattctcaaagggttgagcgggcagcgccgtcgcgttgacaggcggtacgacgctgcgcagaattcggcaccgccgtcgctgaagaaatagaaggcttgggcgacggcggtgtgtcatgcggcgaatgggagagcgatcttccattcgcttttttgcttaagcggccagggcgaagtcctgaggcacgtcttgcacgcccaccagggccacatcggaggcggcgacagcagccgagtccacatgggccacaccggctgcggccagttggtcgaacgtcgagttgatcgacaggcttgggtcgatgtccttgagcagggagtcgatcgccgacgccagtgccgagctgtcgccgctcatcaggccgtagatgatcttgtgcacctggccatcgcggccttcggcctgcaggctcgacaggcccaggttggcgaagctgacttcctgctcagcgagggcgtagctaccgccggcagcgccgccggtgaggaccgtgcccaggttcagcgagtcgatcgaaccccacaaggtgtgcgacggcgggttgaacaaggtgtaatgcaggtcgccgttggccaccaccgccgcgttgctgacagtgctcgacacgccatattgggtaccgtcgaacgggccaggattgaaaccaccggtgttcgaaccctctttgaccgacccttcacggtggttcaggtcaccaaagtaagccgaccagtcgctcaggtactcggcaacggtgttagcggcgtaggcggtgctgtatgaaatagaaatgctcatgcaaaactccaagtcatggggtggtatctccgcagcaagccagtgcctgctgtggttttgcccgtcactgggcaaaatcggtcagaactgatattcaacggtgccctgcaacgtgcgcccacgccccagggtgaaggccaatacgtcgcccagtggcaccaggtaggcgcggtcggtgacgttttccatggccaggcgcagggtcaactgctcggtggcgcggtagctgctgtacaggtcgtagacggtgtagggtttccagtcggccggatagacaccggtttgcgaggtggtcacgccggcgccacctttgacgtagtaaccgccgctgtagcgggcacgaacccccacatccaacgtgcgctcgaagaagcgtgcgcccagcgtcgcggtgccacggtccatcggcatgtgttcggaggagcccaggatcgcgctgcagctctgccccgcattggccacgtcgtccggcaccatcgcgtctaccggcgcccggctgcccggccctttctggatcttggtgacgccacccagccacgcggtcttgctgcagaacgtattactgccgagcatgcgcgtgtagttgaactggccgtaggcaaacccggcgtcgtaatccagctgatactcaaggccgcgaaaacgcgtggtttccaggttgttcacatacgccgcattaccgatgttggcgatgccataaccgggcggctgcacccccagggccatataggaaaagtcatccacgcgggtgttgaagtaggagaccttcatgcccacgcggtcctcggcgaacagcaggtcttccttcagcacgttgaagccgacctcccaggccgtggacgtctcgggcttcaagtaagggttggggaaaatcgattccgaaccgccgccatgtggccggccgctgaccagcgattcggtgacggccggcgggcgccagcccttgccgtacgtggcaaacaattgcagccaatccacgccgggcttgaccgacaggccaaaggtcggcgagaaatgcccttcctcccgatccacgtcataggtcatgggcaagccgacctgccgagttgtgccgataatgaaggtacgggtattcaggccggtttcaccgcgcagccgatagcggtcgtaacgcaacccggcattgaggttcagccagttgtcgtagtcgtagtccaggcgcgcgaacaggctgcccattgcccgatcacccttgggcgtgatgctttccgccgccgaggccgtcaccgccgaatcggcggccaccatctggttggagtccggccggaccttgtcgtagaaaaactccaggccgtagttggctttgatcaccgacagctcgctcaaggcgaaggtcgaaatattctgcgcctgcacaccataggtgttggtctgataggtgacgtcgtagcccttgctgctgccacgggtcagcgtgctttggtcattgcgggtgtcgacgtagtagagcttggccttgaaatcgatcagcgggttgtccggcgtgtagctgtagtccaacgcgaagttctgcgccgtgacgttgctgctgccgagcttttcccagagctgggctttttcggcggtcatcatgttgacgtcgtcgtagtcgacttcggtggtcaggtagctcagttgcaggcgctgatccaccggcaggttcagacccagcttgagcaggcgcgagcgcatcaccgagccggtgtactcgacggtggagtttttgatccggtcttcactggccggcaggaaggaactgccggtgcgcaactcgccgatgctgccccgggtgccgggtttgtagtcaccgagatgacgctcactggcggccaccagcatgtcccacacatcggtgcccacggcaaacgccgaactgccgataaaatgcgtgccgttgctgcgcccgcccaacccggtggtcaaacggatgcgcccaccgatttccttgccgcccttgagcaggtcggcggcttccacggtgcgaaaattggccaccccgccgatcaccccagcgccacccatcgtcgaagtagcgcccttctcaatcacaacttccgacagcaattccgggtcgacatacagcgtgccattgcgttgctggtgaccactttgctggtagttctggcgcatgccgtccactgacatgttgacccggccgtagtcctggataccgcgaatgttcaccgacaggccagggtcttgctggctgaccgccgagtagacacccggcgcctcttcgagcatctcggcggcatgccgtggtgggttgcgatccagttgctcacgcccgaccacactcaccgagcgtggcgatgaatacacccagtcgttggggtgcaggccggtaatcgtggtggtcgccagcgccagcgcggcgccgctctgctccacgcgggtcagggtgacttggcgctcgccattgaagcgatactccaccggcgcattccccagcagacgcgccaacccttcctgcacgccgtattgccccttcaccgccgtgctctgcaaaccggccaggcgctggctgtcgaacagcacttgcaggccggcctggtcggcgaatgccagcacggcactgcccaggggttgcgcggggatatccagcatcagcaccgcaggttgcgccgcattcgcctgagactgagcagcgaatactggagccactgcggcgaacaggcccaagtggatggccagggctaaccggcttgcggtgatacgccccttgttgagtgctgacatttctgtggttccctgcgttgagcgttttcttgtttatgcgaatgcttctcacctagcaagacgtgcgacgcgcaggaagtcagtaaggttttttgaaagtttttcaggaagggggatttcaggcggtgggagcaggcccccaccgggtcatcaatagatcaggctgaggcctgccaggtccaagcgttgcacttgcagttcctgggtgagcgtgtcgagagcggtgtcgagcatgtcgaggcggaacacaccgctgacttcacgatcgcccaatgccgagtcgatcaacaccacgcgcccggggcggtagcggttgagctgttcgatgacgttggccaacggctggcgatcaaagatcaacacaccgcgtcgccaactggtggcgcgcgctacgtcgagctggtccaaagggacgatgccttcctgagtgctgtagcgtacggcctggccttctttgaccactctgtcggccggaccttttttcgggacagcttgcagcgtgacctcgacactgtgctccaacacgccggtccacgcctggctatcgccctcgcgctccaccacaaaccgcgtgcccagcgcccgggtttgtcccccggcgctctgcaccacgaacggtcgggtttcttcgcccaccctcggtgccacatcaaagatcgccgagccttgcagcaggctgattcggcgttgcacaccgtcgtaatccaggcgaatggcactgccggaatccagctcgaccttgctgccatcggccaggtgcacggtgcgcacttcgcctttttcggtgatgtagtcggcctgcatgcgcagcaacaggtccggcccacgcccccagccgacaccggctaccaccacgaccagcgcaacggcagccgcacgctgccatggccggcgccgcctggtcccgcgcacaggctgcgtcgccgccgacgggcgctggcggttcaccggcggctccttgtacacctcgcccagtgccgcccaggtctgttcggcaaagcgcaatgccgcttcgtggcggctgtcgcaggcgatccaatgccgcaactcggcctgctcctgttcggtcagggcaccggcgtgcaggcgcaccgcccactcggcggcctcctcggtaatgctgtgctgttgcggaccctggctattcacgtgtgaatctcgaatttttcgttatataacgctgtgacgagtgaacgggcgtttttcggtaattcattcgtcggatggcgccctctcgccttcctgcaagcgctgcatcacgtaggccaacgctttggccagatgcttttgtactgagctgtcagagatgtccaggtgccgggcgacctgggcgtgggtcatgccttcgatgcggttgagacggaaaatctgctgggtgcgttccggcaattccgccagtgcctgcttcaatgcctgtcgctgttgctgcgccattgcctgagcctccaacccggccacgtcatcttcaatctcggccagcgcctcatggggcacggagtctgtcttgcgccgcgcttcctggcgaatatggtcgatcagcagattgctcgccgttcgatagagatagccctgggagttgtcgatgcgctcgccggccggcttttccgccaggcgcaggaagctctcctgcaccaggtctgcggccaattgcgggtcccgtaccttgcgcgccagatacccgcgcagggtatcggcatgcttgagaaacaggcctttgagatccacgtccgacaaaccgactccctggaatgttaaggaaacaggcgggcatcttaagcgttgtcgagaatgattttcaattgatatctaatctgatccggcggtatgaaaggcctgattaacagttcggtaatcgaacacatccgctgcgatcaattgaccaaattaaccaaccagtacattttatccccacaacgaacaataactgtggagagacgccccatgccgcctatcgtgctggtgctcaacggccccaacctcaacctgctcggcactcgcgagcccgccacctacggccatgaaaccctggctgatgttgctgctttgtgcggccgaagcgctgaacagttgggcctgaaaatcgaattccgccagaccaaccatgaaggcgaactgctcgactggatccacggcgcccgcgcccgctgcgccggtatcgtgatcaacccggcggcctggacccacacctcggtggcgattcgtgacgcgctggtggccagtgaagtgccggtgatcgaagtgcacctctccaacgtgcacgcccgtgaagcattccgtcatcactcctttgtctcgcccatcgccaaggccgtgctcgcgggtttcggcagccatggctaccacctggcactggaacacttcagccagttgctcaaaggatcggcccgatgaaaccgcgcattctcgccggcctgatcggcgccggtatccaggcctcccgtacgcccgcgctgcatgaacacgaaggcgatgcccaaggcttgcgctacctgtaccgcctgatcgaccttgaaccccggcacctggatatcgacgccctgcccgatctgctgcgcgccgccgaactcacaggctttacagggctgaatattacctacccgtgcaagcaggcgatcctgccgttgctcgatgaactgtccgacgaggcccgtggcatcggcgcggtcaatacggtggtgttcaaggacggcaaacgcatcggccacaacaccgattgcctgggatttgccgaagggtttcggcgcaacttgagtgacgtcgcccgccaacacgtggtgcagatgggcgccggcggcgcaggtgcggcggtagcccatgcgctgctggccgagggggtgcaacagttgagtattttcgacgtggaccccgcccgcgcccgcgaccttgtggataacctcacgctacgtttcgggccgggccgtgcccaagtgggcaataacgtgaaaaacgccgtggccgaggccgatggcctggtgaacaccacgccgatgggcatggccaaactgcccggcacaccagtgcccgccgcctttttacgggccgaactgtgggtggcggaaatcgtgtacttcccgctggaaaccgaactgctgcgcgatgcccgtgccctgggttgccgcaccctggatggcggcaacatggcggtgtttcaggcggtgaaggcgtttgagttgttcagtggggaagtgccggatgcgcagcggatgctggcgcacttccagagcatgaatacctgactgagttggaataaaaatccaaatgtgggagggggcttgcccccgatagcggtggatcagccagcttatctgtagctgacccactgtcatcggggggcaagccccctcccacattttgaatgcattccaacctgaaacttcaggcctggaggtaacgcatcaccgaatcacaaatcatgtcccgatgccgctgtttaaccacctcatccgacaggtcgatctgaaaaatctcactgaaggtatggcggttggacacccggtaaaagctgaatgagttgatcagaaggtgcacgtccagcggctccagcccttcgcggaacaagcccagctcggcgccacggcgcaaggtttcccccagcccttcaaggatcttgctgttcatcgccttgatggtgtctgtgcgcttcacgtactcggcattgtggatattttcgatgctgacaatgcgcacgaaatccacgttctggtcatggtgatcaaaggtgaactccaccagccgccggatcgcttcacgcggttccagggccgtgaggttcatgcgcgtttcggtgttgcggatgtcgccgtagagtttctccagcacctcgacgtacaactgctccttgctgccgaagtagtagtagatcatgcgcttggaggtgtggatgcgttcggcgatcgcgtccacgcgagcgccggaaaggccctgctggacaaactcgacgatggcttcctggagtatgttttcgcgggtcttttccggattgttcttacgactcttgcgaggtgcctcggtggtcatggtgcgctcacggccagtgttatgcaggccgtgattatgggccgcgatgccccccgaaagaaagcacccgggccgccgttataaacgcgcctggcgcaccgcgccgctgcgcgatttggccatggccgccaggcgcaccgccacgttggccgcgccgtagccggcataaccgttcttgcgctggatgatctcgaagaaaaaccgcccttcgaagggttcggtgtacacgtgaaacagctcaccgccttgggcgtcacggtcgtacagcacgttgtagtacgccagctcactgaggaattcatcgtcgaaatcgaaacgcgccgccaggtcgtcgtaatagttgagcgggatatccagcagcggcaccccggcctccttggcgcggcgcacttcggcgaagatgtccgcgcagtcgaaggcaatatggtgcacgcccgagccacgatagctcgacagcgcatgggaaatcgcggtgttgcggttctcagagatgttcagcggcaggcggatcgagctgcaacggctgcgcagcgcgcggcttttcaccaggccgtaagggtcgggcagcaccacttcgtcatcggcttcgaaatccagcaggctcttgtagaacagcacccaactgtcgaggctatcggccggcaaggccatggccatgtggtcgatgcgcagcaagccgccgctggaggacgcggcgggctgcaggttgaagtcggtgtcgtagagcccgccttcgctctgatccaccaggtaaatcaggctgccatccggcgcacgcaccgccgccagctccagctcattcggcccgaccaggccgcgatacggctggcctttgtacgccaccgcccgctccagcgccttggcgctgtccctgacccgaatcgcggtggcacacagcgacggcccatgggcttcgaaaaagttgtgggcaaacgaatagggttcgcagttgaggatcaggttgatatcgccctggcgcaacaggcttacgctcttggagcgatgctgcccggccttgacgaaccccaggcgttccaaccagtgggtcagcttggcgccaaggctctcgtccacggcgaattcgaggaactcgatgccgtcgtattcgctggccggcggggtatcaaacagaatctccaccggttgcgccggtgcttgctgtttcaggcgttcgcgggttttctcttccaggtacagcaaggagcgcaggccatccgccgcgttcgcacgggtgggcgcggcgcggaagccgtcgttgaaaatttccagggacagcggcccggtgtagccgctcttgatgatcggcgcaaggaaccctgccaggtcgaattcgccttggccggggaagcagcggaaatgccggctccactccagcacgtccatggccaggatcggcgcgtcggccatttgcacgaaaaagatcttgtcgccgggaatctcggcgatggcgctcgggtcgcccttgagggacagggtgtggaagctgtcgagcaagacgccaaggctcggatgatcgacctgacgtaccaagttccacacctgttgccaggtgttcacatgcttgccccaggccagcgcttcataaccgatgcgcaaaccacggcggccggcatgttcggcgagcaggccaaggtcatcgagcaaaatgcgctcgtcgcccacgcaatcggccgaggcattgctgcacacaagcaccaggtcggtgcccagttcctgcatcaagtcgaatttgcgttcggcacgttccaggttgcgggccaggcggtcacggcggcagccttcaaagtcgcgaaacggctggaacaaggtgatggcaatgcccaggtcggcacacatttgcctaacttcgcgggggctgccgtcgtaatacaacaggtcgttttcgaagatttctacaccgtcgaacccggcggccgcgatggcttcgagtttctccggcagggttccgctcaaggaaacggtggcaatagagcgttgcatgggcgactcccggcatttaaggcgcgtcttatttacggcaaattattggccgctaaactgttcacagcaattaaaatgtacgaaccggttagtttttggtgcgattatcgaacacaaagccgttttggcgaattgacgattttttagccactgcgcaccatcgattcagtaacaagacccagaacacaccataaaaatttcaaaaaacgggtacgacctcatgcctctgcaaaactccgtcctggccgaccgcccggacaccccgcacgccggcatcggcgacaagatccgcggcgccctggccgtgggtaaaacgcgctggggcatgttggccctggtgttcttcgccaccaccctcaactacatcgaccgcgccgcattgggcgtgatgcagcctatcctcgccaaggagatgagctggacggcgatggactacgccaacatcaacttctggttccaggtcggctacgccatcggctttgtgctgcaggggcgcttgatcgaccgggtcggcgtgaaacgcgtgtttttctgcgcggtcctgttgtggagcctggccaccggcgcccacggcctggccacctcggcggtgggcttcatggtctgtcgtttcattctcgggctgaccgaagccgccaactacccggcctgcgtcaagaccacacgcctgtggttcccggccggcgaacgggcagtggccaccggtatcttcaacgccggcaccaacgttggcgcgatgatgacgccgatgctgctgccgttgatcctgcacgtgtggggctggcaggcggcgttcctgtgcatgtcggcactcggcgggatctggctgctgttctggggcttgaaatacttcaacccggaagaccatcccaccgttaaacagtccgaactggactacgtgcagcaggaagtcgaaccagaacaaccccgcgtgcccttcagccgcatcctgcgcatgcgtggtacctgggccttcgccctcgcctactcgctgaccgcgccggtgttctggttctacctgtattggctgccgccgttcctgaaccagcaatacaacctgggcatcaacgtgacccagatgggtatcccgctgatcatcatctacctgaccgccgacttcggcagcgtggggggtgggatcctgtcgtcgttcctgatcggccgtggcatgaactcgatcaaggcgcggctgctgtcgatgctgctgtttgcctgctgcatcgtcggcgtgatcatggcggccggctccagccagctgtgggtcgcggtgtttgccatctccctggcaattggcgcgcatcaagcctggaccgccaacatctggagcctggtgatggactacacgcccaagcacatgatgagcacagtgttcggttttggtggcatgtgcgcggccatcggcggcatgttcatgacccagatcgtcggccacatcctcacggtcacgaacaacaactacaccgtgttgttcaccctgatcccagcgatgtacttcattgcgctgacctggatgtacttcatggcaccgcgcaagatccctaccgtagacgtttgatctatcgtctcagctaccggcgccgctgctgccaggcagcggccagcccgctcatgcagatcaccccgataccgaccaccgtggtcaggtccggggtgtggttgaacaccagccagcccaacaaccccgcgaacacgatctgacaatagccgaacggcgccagcaaggccggtgccgcgaagcggaacgcctgggtcagcatcaagtgcgcggtcatgccgcaggtgcccagggccagcatcaacaccccatgccacagcgtcggcacctgccagaagaacggcaccatcgcactcatcaccagggtattgcacaggcctgcgaagaagttgctggtggtgggcgtgtcgtattggctgaggatgcgcgtgagcagttggtagaagcagaagaacagcgctgaacacaggggcagcaagaccgccggggtgaacagttcgccaccggggtggatgatgatcagcacccctacaaacccgcagatcaccgccagccactggccacgcgtcacatgctcgccgagcagcggcaccgagagcgccgtcaccaggatcggtgcgaggaagttcaccgccgtggcttccgccagggggatgaagtgcagcgccgaggtgaaaaacaggctggtgcccaacaggcataacgcccgcaccacctgcatccccggccgtttgctgcgcagcacgcgcaaacccgattgcggcaggaaaataccggccatcaacaaggtgtgcaccaggtaacgcgcccacaccaccatcacgatcgggtaaaacccggccaggtatttggacaaggcgtcatggctggagaacaggaacgtcgccagtacaatcagcaaaatgcctttgaaggggtgattgacgccggaaaggggggtgctgacagtcatggaattctcttgcgtggcgagctgaacgcgtggcactcaacccggtaatctagcagccgggcctgcgtctgcccctagagcataaccaaacaccgtgcgaacagcgcactaaatcaccggattcgagtccaacgctgcacgttgactgccgtgttgcacactttttaatcaaggccttgccgctatgaaaaaaatcctctttgttctgtctgcccttgccctgctcaccgcatgcaaccagcaagaggcgccagcccccaagccggccccggcgtccgtacaagccacactggtgccggcaacgccgcccaccgacaaatgggtcggcaagtggatcggcgtcgaaggcctctacctcaccatcgccaaggacgacagtatcggccgtggtcactacatcctgaccatgaagtacggccttgatgacgacgactcgggcaccttcaaaggtgaagccaacgaagacggcatcgcctttacccgtccggacggcccgcagcaactgagcgccggcgacggcgaagccaccggtttgaaatggttggcggataaaaaggattgcttgatcgtcgataccggcgaagggtattgccgctaataacggccatactcaacccacatccctgtaggaccgttcatcaaagaggattgccccatgctatggaaaaaaggccgacgcagcgacaacgtggtcgacgcccgcgatgacagcggcggcggtgggggcggtatgcgctttgggggcggcaagggcctgagcctcacggcgatcgtgctgatcgtcggcatcggctggctgaccggccaggacccgatgcagatcctcggccagttgaccggccagctggaacaggcaccgtcagtgagcacgcagacgcgccaggcgccgccggccaacgatgagcaggcggattttgtccgtgccgtcctgggcgacaccgaagacacctggggccaggtgttccaggaaaacggcttggcctacaagaacccgaaactgatcctgttccgtggccgggtcaattccgcctgcgggggtgccacctccgccagcggcccgttctattgcccggctgaccagcaggtgtacctggacctggatttcttccgggaaatgtcgcagcgcttccaggccgccggtgatttcgcccaggcctacgtgatcgcccacgaagtcgggcaccacgtgcagaccttgctgggcatctcgtcgaagatccaggcggcacgccagcaaggccggcagatgcaaggcgatggcggcctgctggtgcgccaggaactgcaggccgactgcttcgccggggtgtgggccaaccgtgcgcaaaagcgcctcaactggctggagcccggcgacattgaagaagcactgaacgcggccaacgccattggcgatgaccgtttgcagcaacagggtcaggggcgcgttgtgccagactcgtttacccacggcacctcggcacagcgggttcgctggttcaagaccggcttcgcccagggccagatcactcaatgcgacacgtttaccgccaagagtctttaaatgaataaacgattgggatggctgctgggcttgttagttacgtgttcaacctgggccgccgagcacggcgtcaaggacgtcagccctgatcgtttccacctggaggccggcgatctcagcctgggcttgagccaggactggcgccagccgctgccccaggtcacccgcgcgctgatcatcgtgcatggccgcctgcgcaatgcgcagacctacctgcacagcgctgaagacgccgccgagcacgccggccaggccaccaacacgctggtgattgcaccgcagtttctgaatgagtccgacgtcaagcgcaaccatctggaaaaccaggtgttgcgctggaacggcaatgactggatggccggcgagccttccaccggtccggggccaatcagctcctacggcgccctcgaccagatcatcaaacacctgggcaaccgcaagctgttcccagcgctgaaagaaatcgtggtcgccggccactccggcggcggccaggtggtgcagcgcttcgccctcaccggccacgaccacccaatgctgcaaaccgaaggcatcagcctgcgttacgtggtggccaacccctcgtcctacgcctacttcaccccacaacgcccggtgaagttcgacatcgccagttgccccggcttcaacgactggaagtacggcctgcacaacctccccgactacgccaagggccagagtgcccaacagcttgagcaggcttacgtgtcacgcaacatcacctacctgctgggccagcaggacaccgacccgaaccacccggcgctggacaaaagctgcgccgccgaaacccagggcgcgtaccgcctgattcgggggcgcaactattttgactacctcaagcagcggcatccgcaattgagccacacgctggtggaagtgccgggggtggggcataacggggatgggatgtttacgtcgcccgagggccagaaagtactgttcacgccataacctgtgggagggggcttgcccccgattgcggtctgccagctacacatgtgctgatttatacaccgctatcgggggcaagccccctcccacagttggtctttattgtctgggctggatcatctgatgcagcaccgtgcagtccgatgcatgccaatcggccaactccggccacgggttctccggcagattcaccaacaccgtccgcgtccccgccgcccgaccacaatccaggtcgaagcggtaatcgccgaccatcaccatctcgctgggcgctacttcccatgccgccgccagtttcagcaggccgtccggatcaggcttgggttgcgcgtcatcacgccccaacacatcctcgacggcaaagcagtccgccaggccaatggcttgcagggtgatatgcgccaactcccgcgcattgcgggtcaggatgcccaggcgatagccgcgcccggccagttcgcgcaccaggtccaccgcaccgtcggcagccactgaacccaacgccagctcgcgctcatgctccagcagccaggcatgcttggccgccgcaacctgcgccggcaacgctgccaggtgcgtgaggatgtcgtcttcgggcgggatttccaacgctacgcgaatggccgcgaaatcatgcaccgccaccgtgagcgtgccgtccatgtcgaacacccaatgtctaacgtccgccaggctcatgcccaatccttgcgatggcgaatcaggccttcctgggtcaccgaggccaccaactgcccggcgcggttgtacacgctgccccgggagaacccgcgggaattgccggcccacgggctgtccatggcgtagagcaaccagtcatcggcacgcaggtcggcgtggaaccacagcgcgtggtcgaggctggcgacctgcatatctttctgccatacggttttgccatggggcagcagcgaggtggtcagcaggccaaagtccgaggcgtaggccagcaggtatttgtgcagcgccggcgcgtcggccagggcgccgtcagcacggaaccacacgtacttgaccgggtcggacggctgcgggttgaacggatctttttcggtgaccgggcgcacttcgatcggcttggggcacagcagcttgtcacgcatgtgctcggggatcaggtgcgcacgctgctgggtcagttccagctccgagggcaggttttccgggccgaccaccaccggcatggtggtctggtggtcgaagccttgctcgtcgtactggaacgaggtggtgcaagtgaagatcgggtggcctttctggatagcggtcacgcgacgcgtgctgaaactgccgccgtcgcgaacgcgatccaccgaatacaccaccggcaatttcgcatcaccggggcgcaggaaataaccgtgcagcgaatgcacatgccgcgcttcttctaccgtctggctggcggccgacagcgattggccgagcacctggccaccgaacagttggcgaaaacccaggtcctgactgcggccgcgaaagaggttttcctcgatcggctccagggtcagcaggtccaccagatcttccaatacttggctcattgagcaactcctaaaatctatcgggcattccgggctgcctatccgtgcagcgtgtccaaccattgggcgcgggtgatgcggtacaaaacatgatggcgcagcgggtcatcggctgcgaccttggggtgttcaaaatctgcctggggatcgtaatgcataccgatggcctgcatgactttttgtgatggcagattggcttccgtggtgaatgaaacaatctcgtccaagttcagacgatcaaaaccacagcgcaatgcggtccaggcggcctcgctggcatagcccaggccccagtgttcgcgggccagacgccagccgatttctaccgccggggtaaagtcggcatcgaagctgacattcagcaacccggtgaggccgatgaattccccggtgtccttgcgttgcaaggcccacaggccaaagccgtattcggcgaagtggccgcgaatccggccgatcaacgcggcgctttccaggtggctcagtgtggccgggaaataacgcatcacctgcgggtcggcgcacatgcgcgcaaagtccggcaagtcgctgtcgcgccattggcgcaataccaagcgtgcgctttccaattcgagtatcggctccatgggtcccctcccttgccatgtgcgtgagtgtacaacgcgggtaagatgcgccgcaggttcccgtcagaaaatcccatgcctttgccattgatctaccacgatgactacagccccgagttcccggcggaccaccggttccccatggacaagttccgcctgctgcgcgaccacctggtgtccactggactgaccgaggacagccaactgctgcgcccgcagctgtgcccgccggaaattctggccctggcccatgacgcggggtatatcgaacgctacatgggcggcgagttgtcccgcgaagaccagcgccgcctcggcctgccctggaacgaagccctggcccggcgcaccgtgcgcgcggtcggcggttccatcctggcagcggagcaagcattggaacacggcctggcctgccacctggccggcggcacccaccacgctcactacgattacccggcgggcttttgcatcttcaacgacctggcggtgatcagccattacctgctggccagcggccgggtcaaccgcgtgctgatctttgattgcgacgtgcaccagggcgatggcacggcacgcatcctccacgacacgccggacgccatcactgtatcgctgcactgcgaaaagaacttccccgcccgcaaggcccagagtgactgggacatcccgctgccgatgggcatgggcgacgccgactacctcaaggtggtggacgatgccctcagctacctgctgccgctctaccagcccgacctggtgctgtacgacgccggcgtcgatgtgcacaaggacgacgccctgggttacctcaagctgaccgaccaaggcgtcgccgcccgcgatgaaagcgtgatgcgccattgcctgggccgcgacatcccggtgatgggcgtgatcggcggcggctacagcaaagaccgccccgcactggcccgccgacacggcatcctgcaccacagtgcgcagcgggtgtggacgtcatcaggttgtcactgaactgtgagcgttacccacaatgcctgtggaaccacctgtggataacttgagcgtaaggcgctgaaagccagaaccagtatagcccgtaggaagctgtacgttttttaaccagaatcctttccacaaccgtgaaacgttgtggaacatggcatttatggccgttttgcaacaaaactgccgcaccccgccatcaacctgagggcctcttccgctttcagagtacccagcgatggcaacctacaagatcggcagcagctcgacgcccggcaatgacgacgccctgaagaaagtcgccgccaccttcgacgcggcaatgtcccgcgccctgtccggtttcaaggacgccgcccaccccggcaatttcaaggtgctggcggtgaccgacaaccctgccctcgcctccagcaaggccgacggctaccgcatcgcccaggccggtgacaccgcaccgggcctggacacctacaaagccatcggcccggccgatgaagtcggtccagggatgattcgctacgaaaccctatcgggcgataaggtggtcgtgagtaaggaaaccaacagcgacctgtacgaaaaagtgaagtccgatggcgagacctggggcctgatcaacgacagcaaaaacgcaggctaccacctggccggggccgatgaagccggcagcgtgagcctggtgggcacgccggaagaactcggccacgggctgatccgctacgaaaccgcgtccggtgacaagatcatcgtgtcccaggctatcagtcccgacctgtacgcctcggtggtcaaggaatccaacggcatttttggcgtcggcggcgccgtggacaccaattggatcgacaactccaaatacgccagcgccaaggactgggacaagattgtcggcaacaccagcggcacgccgacccaggaagagcgcgacctcgatcgcccgcgcgccgcctcgaaaatgctcagcgacaactgggacaaatggggcctgcacgaccgccccatcgacttctccaacccgcccgccgacctgccgcccgaagcccaggcctgcctcaaatacctggccggcagcccgagcctgatgaacgccctggacagcggcggcctgggcaaaagcgacggggtgattacccgcgccgatgtggataagttcatcagccaatccaacaaggatctgtcagctgcctcgaagtcgtacagcaccttcctcagcaagaacccggacgcgacgagcctggccaagcaaaacgccaagtccgccgccatcgtcatggctaacatctccctggtgagcagcgccggaccggagatgcagggccccaaccagcgcgccaacaacggcagcctgaacaccgccaacctcaaggcgatcaaggatgactcaggcctgagccccgagctgaccggtgccgcgggctactggtcgacaccgggcatgctgcgcaccctcgacatggccggcgacctgcccgccaccgcgaaggctgacggcatcacccaacagaaaaacatcggcgcctggctggaaaaccaggcgcccaaggacgaccacggcgtgttgatgatgctcagcaacgcctcggtgcgcagctcggtggccgacgtcgacacctccaagctgaccaaggacgtgctcgaacacccggaaaactacgacggcaaaaccaaagccgcggtgatgatggaaatcagtgacgcccgcgcccgcatggccgccagtgacaaagtgggcgacggcgacctgtacgccgggatcaccgccgatacccaataccacctcaacccgaccaaatccaaggtcaccgaccagctcgacgccgccgtcgccaagctttccagtgacccggacgtgaagaccttcctctcgcagaaccaggcctccggcatgcgcgatatcgtcaacagcgacccggcgatcaagcaccaactgcaggcctaccaggacggccagatcaacagcggcaatgtgctcaacaccgccctggccaccaaaggggctgatggcaaaccgctgtcgttgatcgacgctctgagcctggccggcaccgacgccaccctcaccgacctggccctgggtggcgacggccatgtggacctcagcgtcattgccgaaaaatccggcaagtccggggacatcgagcaattcttcaaagaccacatcctcaacggcaaagacctgcaagacgccctcgcccagccgaacgccgacccgatgaccgccatcggccaatacgcggccaaggcggagttgctcaaggagttcctcggcgacaaggtctcggcccaggattcgtcgacggtgcagcaatacgtcaaccaggcggtgtccgactccctggtcaacggcgccaacgacgacgtgctcaaaggcgcgttcggcgatgccaatggcaattttgacgaggccaagaccacggccatcatcgacaaagccatggccgacgacccggacctgttcaaggatgccagcggtgtgcagatcaagccgcaggacgtgatctcgttgatccgctcaatgtgggacgtgaaccgccagggccagaagatcagcgacgtgctgcccaaggccgtcgatgggctgaagctcaacgccagtgacgcctataaacagggcctgctgcatatcggcagtgcgctgctggccggcggcgtactggcggcgcgctcggccaccggcggcaacagcccggcggacaacgccgggcgcgtggcggcgggcatgcagttcgccgggctgatcaccgaaggcggcaccaagtacgccaaggaggccggctacggcatgacctggaaacccacgccgattgacccgaacaaaccccagggcatcggcgacttccccaccggcaaaatggtgcagaacaccgacggcctcaaccgcctgggcaacctgggcaagatcgtcggcggcaccggcagcttcatcggcggcgtgttcggcctgatcagcggggtcaacagcgcgtttgccggcgacaacgtcaacgccggtttctccctcaccagcggcgccctgggcaccggcgcggcggtggcctcgattattgaaggcggcgccggcctgttcggcgtggcggatgcggcggcgattgccggcaccttcgccggtgtactcggctgggctgcggcaggcgtgggcatcgtgacgtcgtttgtgttcccgatcatcgaggtggtgaagcgggaaaaacagcaggacgcgttctttggcaacctggtgccgaccctggataaatatggcctcactggcggcccgatcaccgacgccgaccgcaaggatgagtacccgccttacgccaataccggttttgcctgacccatatgagcccgctcgccactacagattttctcccccccgtaatggcgcggcattgcttacaatggccaccctttcgttttcaccaggcttgacgatgtccgctactgctccttcccacgttgccatcatcggcggcggccctaccgggctgatggccgctgaagtcctgagccaggcaggcgtgcgggtggacctgtacgacggcatgccgtccgtggggcgcaagttcctgctggccggcgtgggtggcatgaacatcacccattccgaagcgtacccggcgtttctttcgcgctatgccgaacgtgcgccgcacatggcgccactgctgcgtggttttggtgccgaggcgttgtgcgagtggattcatggcttgggcatcgagacctttgtcggcacctcaggccgggtgtttcctacggatatgaaagccgcaccgcttttacgtgcctggctcaagcgcctgcgcgatcagggcgtggttatccacacccggcatcgttggctgggctggaatgccgagggcggcttacttatccacaaccccgaaggcgaaaaaactgtccacagcgacgccgtgctgctggccctcggcggcggcagttggtcgcgcctgggctccgacggtgcatggctcaagttgctggaggatcgcggcgtgccctgcaccgcgttgcaaccgagcaactgcggtttcgaggtgtcggcctggagcgaattgatggtcagcaaattcgccggcgcaccgttgaaaaacgtcgccatcgggctgggggatgacaagcctcggctgggcgaatgtgtggtcaccgccaccggaatcgaaggcagcctgatctatgcgctgtcagcgccaatccgcgaagcgatcaacagagacggctcggccaccgtgcacatcgacctgctgccgagcaagccgctggacaaggtccaggctgcgctggccaaaccccgtggctcacgctcaatgagcaaacacctgcacagtcagttggggttggatggggtgaaggcagcgctgctgcgggagttgacaccggccgaccacttcaatgatccggcgcagttggcggtggcgatcaaggcgctgcccttgaccctggtgaagacccggccgatggatgaagcgatcagcaccgcaggcggcgtgccgttcgaggcgctggatgagcggctgatgctcaagcagttgccaggcgtgttttgtgcgggggagatgctggactgggaggcgccgaccggcgggtatttgctgacggggtgttttgccagcggccgggcggctgggcgggggatgttggagtggcttaatcgctgagatttgcgctgaattcaaggccgccatcgggggcaagcccctcccacatttgactgtattcacacatcaaagtgtgggagggggcttgcccccgatgaggccatcagcagcgccaaaaaatcatttcttcttgcgcggcccggtattgaaaacaggcaccttgcgcaccggcttgatcgacggctccaccggcgccgcttcgccgctgtccacccacttgcccaggttgcgcttaccgccaccacccgacgttttaggtttcttcggctttttcggcttcttcaccacctgcccgctggcatcggtgtccggcacgcggtgttccggctcgaagtccggctccatcttgcgggtcaaggtctgacgcgtgagcatctcgatggccgacagcatgttcacttcatcggcacacaccagggaaatcgcctcaccggtgttgcccgcacgcccggtacggccaatacggtggatgtagtcttcagccacgatcggcaaatcgaagttgaccaccagcggcaagtcttcgatgtccaggccacgggccgccacgtcggtggcgaccaggatctgcacgtcactcgacttgaaacggtccagcgcacgttggcgggtggcttgcggcttgtcaccatggatgccgtcggcgttgatgcccaggccctgcaacttatccaccagcgcatccacgccgttacgggtcttggcgaacaccagcacctgcttccagcgacctttgcgcatcaagtgcacaaacagctccggcttgcgcttcttgtccaccggcaccacccactgcttcacggtgttggcagcaacgttgcgcgggctgacctcgatgctcagcggatcgttgagcatctgcccagccagcaggcggatgtcatcggagaaagtcgcggagaacagcaaggtctgacgctttttcggcagcatgcggtagatgttcgccagctcttcggagaagcccaggtcgagcatgcggtcggcttcgtcgagcaccagggtttgcagctggttgagtttcagcgcgttctggcggaacaggtcgatcaggcggcccggcgtggcgaccaggatgtcgacgcccttgcgcagcttcatcatctgcgggttgatgctcacgccgccgtacaccgcgtaggtggtgagcggcaggtgttgggcgtactcggcaacgctggcgtgaacctgctcggccagctcgcgggtcgggcacaggatcagcgcccgtgccgagttggcggcgactttcggcccttccatcgtcagcagttgcaggagcggcagggcgaaaccggcggtcttgccggtgccggtctgggctgcggccatcaggtcgcgaccggccagcaccgccggaatggcttgcgcctgcaccggcgtcggggtctggtagccaagcgtctcaagggcgcgcagcaagggttcgatcaggccaagggtggcgaaagtcatgtgtttaccgtaggaaaaattcagcgcaaggtcgcaatgcgccgcagtttaccttatttccggcttgggcttgcgccactggggcaggctgatcaacagcaccgcgctgataatcaccagcatcgccagggcttcttcgacgccgatggtctcacccacgaacacaatccccagcaataccgccaccgccgggttgacgtaggcatagctggtcgccgccgccgggcgcacgtgcttgagcaggtacatgtaggcgttgaaggcgatgatcgaaccgaataccgccaggtaagccagggccagccagccctcgatcggtggcaccgcgtgcaaccgctcaccggtcagcgcactgcccaccaacagcagcgcaccggcaatgatcatttccgccgcgctggccatcgcgcccgccggcaacggcaagtgcctgctccacaccgaaccgaaggcccacgacgcggcggcaaacagcaacaacatcgcgccggtcgggcttgattgcaggttggagcccatgttgagcatggcaatgccgataatccccagcaccaccccggcccactccaggcgggtattgcgcgcgccccagaaatagccgcacaacaaggtgaacaatggcaccgtcgccaccgccaacgccgctacgccggacgcgacaccggtgtgttcggccaccgtcaccgcgccattgccgaaggtcagcagcagaacgccaatcttcgccgcagccttccactgcacccaggtcggcgccggcgccccgcgccagcgcaaaaaaccatacatcgccaaaccggccaccagaaagcgaatcccgcccagcatcaacggcggccagtactccacgccaatgcggatcaccaggtaggtagagccccaaatcacatacagcgcaaaaaaggcagcgatcaacggtaagggaaagcgacgtgggccaggcattgggcagctctaaggcagagagaagagaggcttattctaaaaaggcaggtcgttaaacataagttacaaaacctgtttaaaacgccgttacacttttcaaagcatggttgtgaaggctataaaccgtgctttcgaaagccacgcacaactggagccttatcatggacaaatacgaccgcatgctcctcagcgcactgctcaaagacggccgtgcgtcctacgcgcaactggcccgcacggtaaacctctccgcccctgccgtggccgagcgcgtggccaaattggaggccagcggggtgatcaccgggtatcaggccaaggtggatttatccaaggtggggttgccgatccagtgcgtgattgaactgcggctgaccaatcatggcagtcagaaggtgtacgacgcgctggcggaaattccagagctgaccgaatgccatcgggtgaccggcgacccgtgcgtgatcatgcaggcggcggtggggtcgatgccggagttggagaatttgatcaaccggatcgcgaagttcgggttcagcaagacctcgattattttgtcgagtgcgatagagcggcgggtgccgttggggcagttggaggggaatgggaaaaatggtggttgaaccgcaaagtcgacaatctgaatgaagcggaaaaacagaagggtcctaggcagcgataggattctgcctactgaccattcagaaacctgccttcaaaagccaagttttcaatggccagcaagacctatctctttcatttgaaggatgtttccgagagaatcctggagccttgcgtcagccggatccggtagctagtctcgccccgtcatcgaaaaaatcggtgatcggacgtgcaagtccagctcgcaaaggtgcacaaacgccctacatctcaacgtgcggttttaatgaccgacgtttatctgttatggcggctgtgcgctggagaccttcggggtctgccgggttctcctttgccccggtcttgcacacctgcgtacagctgccaccctctttcgcgtgcaagcgaacggtgatggcttcttaattcagaggagttacaccatggtcaaagtaacccccgatccaccccgtttcctcagcgaagacgccctgctcaaccgccgagccatcgactattacctaaaagcctgcgccccggatgcgcccgccttcaccctgaacgacaacctgagtttcgaagacgccctcgcccatgcggccgatttgctgcattgcgcggtggagacagcgcattcatcgaatgaggcgatgaaggcgcaacagcgggccgtgatgcatttggtggagatggcgaagggggtggtggatcgggcgttggcctgtgtgcagcctcgctaaacaccgcagaacccatgtgggagggggcttgcccccgatggcagtgtgtcagccaatacatctgtagctgacaggccgctatcgggggcaagccccctcccacatgttgagtttcacattcagagctcagtattttggggcgtgtggcgaggtcagaacccgcgatgcttcttcaggtgctcattgatcttcgccgccggcactttctgcaaggtgcacagcaggtcgtgggacagttcgcgcaagccgtgggtacggcgcagttcctgggccaggtgcgccgtgaggttggccgccatctccgcatccgccagcgcccggtgggccttgccggtgtggggcagctgagcgaaggcgttcaacgtgccgagcttgtgattgggcgcagacggcatcaggcgacgcgccagcaacagcgagcaggcaaatttctgtaaccgggtgcggcggatcaagcccaattcataatcccagaacttctggtcgaacgcagcgttatgcgccatcagcggcgtagtaccgacgaactcattgacctcgttcatcacccgctccgccggcggcgcgctgcgcagcatggcgttgctgatgccggtgagttgttcgataaaacccggaacgcgtacaccggcattcatcaggctctggtagcggtccacgatctggccacgctcaaggatgaccaccgcgatttccgtggcccggcagtggctgctcggggtgatgccggtggtttcaaagtcgatgaccgctatacgttccaaacctgttccaactccgtaaaagatctatttgagcaacaacgcgccttcaatcggcacgtagcggctggcggcgcgaatcagcgaattggccgtcagccccggcacgccataggccacggcttcaacaccatgcttgtggataacccggtctaggagcatgtcgaagtccccgtcgccggaggccagcacgatttcgtcaacgtggtcggcggcgtccatgatgtcgagggtgatgcccacgtcccagtcgcccttggccgagccgtcgctgcgctggatgtatggcttgagttttaccgtaaagccgaggttgcgcaggatttgctggaactgctgctgcttgctgtcgccacggtcgatggcatacgcgtacgcctcgacaatctgcccgcgcgcgctgatgtcagcccacaaagccgcatagttgaagtggcaaccataggcctggcggacggtgtagtagaggttttgtacatcggcgaacactgcaattttcttcaccgcacttcctcatgacagccaggcgccagggcccggaaaggctgcaagtatgccagtcgcgacgaggttgtcgggaaaaatcagaccggggcgacgcagcgccccgggccgaggtgggtcagacgaaggaatcgtcgtcgccgaaagaagacgaatcgtcggaatagtcgctgtcagcgaagctgtccgaattgttgctgccccagctgtcgttgccggcgtacttctggtcatcattgccccagttgccgttgtcactggcaggcgctggctcctcacgaatgatttcttccacgacttgcggctgttgcgaattgtggttgaacaggctgctgatgccttcggccagcaatacaccaccggccacgccggctgcggttttcatcgcgccgccgaggaagccgctgcccaccggagcggctggagcaggctgttgataattctgctgcggggcaggttggctgaacccaggccgcgccggttcgcgccagccgccaccagaagaaggcggtgcactttgagccggctgctgatcacgggaaccaccgccgccaaagatgctcgacaggaaaccgccgctgctcgccggagcaggctgcgcggatttggccctctgcagttcatcctgcaattgctggatctgctgcgcctgctgcttgttctgcgcgtcgaggctcttgagcgcatgttcctgcaccaggatcgactgggtcatgtagtacccggccgctggttggcgcgtcatgtgctccttgatccgcgcttcggcctgggcgtcgcggggggctgagtccgtttcggcttgttgcaaccgtgaaaacagtccatcgatcagggtttgctcttcgctgttcatggcgacctcgttagattgccggtagaaatcgtggtgtcgcctgtgatcaggcgccgtgctagttatgggggtgttacgagttgtttcaatagtctttactcaaggtttacgtttgcttaccgccggtgatgatcggttaaagtgttgcccttgctttcaggcctgcgatgaacttgatgaatccgttagacgtgctgcgcgactccttccgtttcacccaacgcaacctgggcgctatcgtccagttgtgcttgccgttggtgattttcgaagccctgctgcaacaggtgctgaatcacgtggtaggcgaggatgcattccccggctacagcgtggtggtggggttgctggtgtacccgctgtacaccggggccttgatcctgtttctggatgcccgcacccgtggcgagtcgccgcgcaccaaggatgtatgggccatggccctgactctgtggccgcgctttgccctgctgacagccatgagcacactgctgattctgctggggctgtcgctgtatttcctgccggggctgtggctgatggtggtgctggcctttgccgagtacctgctggtgctgcgcggcatgccggcgttggaggcgatgaaggaaagtttccgcctgagccgtgggcatttctggcggatcctggtgtgcctgctgtgtgtgatgacgccgttgtggctgctcaagggcgccagcgtagcggcctaccccgagcccgcgccgctgctgggcctgttactggacagcgcccacagcttcctgcagttgtttaccagcgtggtgctgttccgtttattcatgctgatcggtggcgatgccgacgcgcggtgatatgctccgtgtcacctctgaaacgctataagccgagccgatgacccgtttattgcgcatcaccttgctgagcctgctgatcatcgcggggttgtttgcagccatggtctacagcctgacctggcgccccgagcccaaggaaaccctgccggtgagttgcgttgcgccgcgtgcgcccacgctgctgccggggcaggcgctcaaggtcatgacctggaacgtgcaatacctggccggcaagaactacgtgttctggtacgacacggtcgatggcagcggcccggatgatcggcctaccgtggaagacatggccgccagccttgacgaagtggcgcgggtgatccgcgacgaacaacccgacatcctgctcttgcaggagctcgacgaaaacgccaagccttcccactatcaggaccaactggccctgctgcaagaacgcctggtcgacctgtacccatgcagcgcccaggccttcgactggaaagccgacttcgtgcccgattggcatatcttcggcagcgtcggccgaaagctcgcgacactcagccgctatcagatcgaacacgccgaacgcctgcaattgccggcacccgaggccaacatcctcagccgccagttccagcccaagccggccttgctgctgacttacctgcccctgagcgacggcggccaactggcggtgctcaacacgcgcctggacggtgacgccccagggcgcagcgcggtgctggagcaggtacaaaccacggtcaagctgctggataaattcgaaggccgtggcacgccctggctgatcggcggggatttcaacctgctgcccctgggccagttcctgcgcctggacgccaccaaacgcgggcagtattcgccagacagcgagctgcacctgctgtgggacaaatacccgatgatcccgagcaacagtcaatccagcgggattgaccgtgaaaagtggctgacccacttccccaacgacccgagtgtggacgggccggatcgcacgctggattacctgttctacagcccgcggatcaagcgggtcgaggcgaaggttcgccaggaagacaccttgcgcatctccaaccacctgccggtgatcgcccggttcctgctaccccccgcgccataaccaacaccgtaaaacccatgtgggagggggcttgcccccgatggcagtgtgtcagccaatacctctctcgctgccagaccgctatcgggggcaagccccctcccacatttggaccctgtggtgttacgacttgcgaggttttatccgtgccgtcgcctcggccaccaacggatcatccggccagtaatgcttggggtagcgccccttcagatccttcttcacctcggcgtaggtactgcgccaaaagttcgccagatcctgcgtgacctgcaccggccgccgcgccggggacagcaggtgcagtttcaccacctggcgcccaccagcaatgcgcggggtgtcggccagcccgaacaattcctgcaagcgcaccgccaggatcggcggctgttcgctgtagtccagccgcaccgacgagcccgacggcactttcacatgctgtggcgccagttcatcgaggcgctggggcagcggccacggcagcaggttgtgcaggaagctggagatatccaggttggcgaaatggctcaggcgcgagactttgcccaggtagggcatcagccaatcttcaagattggcgagcaaagccttgtcgctgatatccggccactcgctggctttaccggcgtcaaggtgacgcagcagcatcacgcgggcctgccattggcgcagctccggcgtccacggcagcagctccagacctttgcgacgcaccaggttgaccagcgcctggctgcgtgcggactcgtcgaggccggtgagcggttcgcggctgagcaccagttcaccgactttgcgttggcgttcggcgcgcagcacgccttcgcgctcgtcccagtcaagctgatcgacgttgcgcacttgttcggcaagcaccgtgtcgaacagcgccggatcgaaatccgccgccaggtaaatgcgttcttcacgctggccctggcggctgcccaggtcggcgatgaccagccagggttgcttcatcaggctgtcggcctcggcgaacagcgccgcgcggccgttggccaggcggtattcggcgccgcctgggcgacgttgctgggcgacgcggtccgggtaggccagcgccaacagagcgccgagccaacgcggatgatcgggatccgccacgggttgcgtggcctggcctctcaagtagccgcgatattgtcgggccaattgtttggcccgttgcacgccgccttgagtaccgcgcgcgcgttcttcaccggacagcagcgccaggcgactgtgcaaatccgcaccgccgccgcgcaggatgtcgcgctcgcccaacagcgcggcgacatcgcacgcggtgctcgccagccccaggtcctgcccgcgcaacagcagatgggcgatacgcgggtgggccggtaactcggccattttctggccgtgggcggtgagtgtgtcgtcattcaacgcgccgaggcgcacgagcaaatcctgggcctgggcatacgcggcggtaggcggcacgtccagccacaccagttgcgtgggcgtgacgccccagcgtgccaactgcagggccaggccagccaggtcggcggcgaggatttccgcgctgccataggcggccaggccttcatgctggtcctcggaccataggcgataacacacgcccggctccaggcgccctgcccgaccggcacgttgcgtggcgctggcgcgggagatgcgttgggtgtcgaggcgggtcatgccgctgccggggtcgaaacgcggtacgcgtgccagcccggcatcgatcaccacgcgcacgccgttgatggtgaggctggtctcggcaatattggtcgccagcaccactttgcgcttaccggcgggcgccgggtcgatggcggcgcgttgggcattgaggtccagttcgccatgcagcgggcacaacagcacatcgctgcgctcgcccaaggcgtccgccaactgctggttgacccggcgaatctccgcctgccccggcaagaacaccagcacgctgccggtttcgtcgtgcagggcttcgaggatggtttgcaccacgcgtggttcgatgaattcaccgggctgataagggcggccccagcgcatctgcaccgggaacatgcggccttcactgcgcaggatcggcgcgtcgtccagcaggctggcgaggcgctccccttccagagtggcggacatcagcagaattttcagcggttgctcgtcgcgaaacagctcgcggccgttgaggctcagggccagtgccaggtcggcgtcgaggctgcgctcgtggaattcgtcaaagatcaacagccccacgccctccagcgcagggtcgtcttgcaggcgacgggtgaggatgccttcggtgaccacttcgatgcgggtgttggggccgactttactgtccaggcgaatgcgatagccgaccgtttcgccaactttttcacccaactcgctggccaggcgttcggccgccgcacgggcggccaggcggcgaggttcgagcatcaggatggtctgcccggccagccagggctcgctcaataacgccaaaggcacgcgggtggttttaccggcgccgggcggcgcttccagcacggcttcatggcgattcgccaaggcgtcacgcagggcgggtaaaacttcatcaatcggcaacgaattcatactggctccaaagcagagcggcgagtataacggcgaactgccgagtgccgacgatggtctcagaaacgccacccacttcaattgcgaatgcaatcaaaggtgggagctggcttgcctgcgattgcggcgtgtcagccaatgcacttctgactgaaccaccgctttcgcaggcaagccagctcccacattggaacggcgtcgttcagccgatctagcttatagtcctctttaaatcgtgttcaggagaatgttatgcgtatcgcttcccgtgtcatcggcggtgtcctcgccgtcaccctgctgagccaattgacggcctgcggttcgatcttctacccggaccgccgtggccaaatcgatggcaagatcgacccgaccatcgccgtgctcgacgccgtgggcctgctgttctatgtgatccccggcctgatcgcgttcggtgtggacttcgccaccggcgccatctatttcgaaccgggcaagaccgcccaggtcgacccggccaaactccacgacgccatcggcgccgacggtaaggtcgacaacgccaagctgcaaagcatcatccagaaggaaaccggccgccgcctgccgctggacgacccgcgcatgatccagttcaagggcagtgtgcagcaactggcgtccctgggcctgcaacccgctgcctaaggaccgtccatgaccagcagtcccgaacacgccaggctcttgcgcctggccacccgcgcttcggtgggcgtggcctgcgcgctgattatcaccaaggccatcgcatggtggctcagcggctcggtgagcatgctcgccggattgaccgactcgctgttggacggcgtgacctcgctgttgaatttgctcgcggtgcactacgccttgcgcccggccgatgacgatcaccgctatgggcatggcaaggcggagtcgctgtccggcatggcccaggcgctgtttatcggcggcagcgcggtgctgatcgcattccaggcctaccagcgcctgcaacacccggagccggtcggcgcaccgtggctgagcattggcgtgattgtgttttccctggtgctgaccgtggcgttgttgatgctgcaacaccgggtgatccgcgaaaccggctccaacgccgtgcgcgccgattcgctgcactatcgctcggacctgatgctcaacggcagcatcctggtggcgctggtgctggcggggtttggctaccaccaagtggacgcctggttcggcctgggcattgccgcctacatcttgtggagcgcgatccagatcgcccgggaaagctttgcggtattgatggacgaggagctgccgccggaggtcagccagcacatgctggaactggcccgtggcgtgccgggcgtgttgggcgcgcatgatttgcgcacgcgcatttccggcagtcactggtttgtgcaactgcacctggagctgccgggggaattgacgctgtcagtggcccacggcatcagcgaccaggccgccgacgccattcacaaagcctacccgcgtgccgaagtgctggtgcacgccgacccacgggaagtggtcacgggcaataagccctagtactgcacctgatagccgcgactgctcaggcagttgccctgggcctggcggtaggtttgcaccaccgccgggtcaggcgcgtaggtgacttgctgcgggtcgaaaccgctttgctgcactgcccagcgatagcagtcataaccgtcctgctgcacctgggccggcgactgcccgttggcgggatacgccaccacgtcatagccattgccttgcggcgcgggcggcggcgctggcacctgcgtcggtggttgcaccaccacgtactgttgggagctgctttcgtaggtgtaatacgcaccggccgcgaggaagaacagcgtgctgcccacccacacttcgcgcgcgtagtccggcaggtaatgcacgcggatgccgtagggtggcgtcaccactacataacgcgggccttgcgggcgataccaatagccgccggagtagaagtaatcctggcctcggtaaggcacgcggtagttgcggtcggggaagcggtcgatcacgtagcccgggcgatgttgcgggcctgggccccagccattgccatgcccatcggggcgacctggccagcggttgtcgccggggcgcgagcctgggccgccggcttcccagtgtgggttgccgtcattgcggcgcgggatgtcgcggtagtagccctggcgcggttcctgggtctggcgcacggtgtcggggcgactctggatcggcaggttgttcgatggctgtggttgaggctgcggccgcccttgctcattaccttgggggcgcccttgccattggccaccaccgttttggccaccacgatcaaaatgctgattctgcgggcgtggctgattgttttccggccgaggctgattgttctgtgggcgcggctgctcattcccccccccaggtcgcccaccctccggccctctttcatgctggccgccgccatcaccgcgcggcccgttgtcacgctcgtcggctactgcctgggcgccaacggtgaccatcagcaaacctacacctgccatacgccagatgcgcttcatgctattcctcactgcggattagggcctgtccatgagactggaaaagccaggcccggttcgcggacaggttatcagcaggcaaaagaaaaggggtgacccgtcggccaccccttgagaacttcgtcctggctcaacgcttttggcgttggctcacctcacgccgtcttgtggacagtgtgcagcctggaggccggctcaaccctgctggggtggcggccgcagctggcctgattgggcgggctgctgtggactgttgtccaggcggtgattctgttgataaagatacccgtaggcgcccgacagatgattgcgaagattgcgtcaataaacagtgcttgcgcaatttttaacccttcatagataattcaccgcaatagttacgacaaaggccaacccaatgagcaagcttgaccgatacgacctgagtattttggcggaattgcagcgcgacgctaggatctccaaccaggagttggccgaacgcatcggcttgtcgccgtcgccttgctcgcgccgggtcaagcagttggaggacgacggctacatcgcccgccaggtcgccctgctcgaccgcaagatgctcggcctgagcctgaccgcctacgtgctgatcggcatggaccgccacacccccgagcgtttcgagaacttcgaggcggcgatccgcaccctgccccaggtgctggagtgcagtctggtgacaggcatggatgcggactatcagttgaaggtggtggtgccggacatggatcactatcagaaactgctgctggggcatttgacccgcatcgaaggtgtgaccagtgtgcggtcgagctttgtgctcaatcaggtattgaacagcaccgaactgccactgacgcacctgcgaacctgagatcaatataaatcaactgtgggagggggcttgcccccgatggctgagtgtcagtcagcctatatatgactgacccagcgtcatcgggggcaagccccctcccacatttggattgcgcttcgactcaggtcaatgttgcgtctgtaacactgccttatacttcccgcctgctcctgtcggaaaaacaccatgaacaacatcgaccccgccctcttcgaagaatggatgatgaccggcctggtcacgatcctgatcattttcatgggctttatcgtctgggacctggcgaagaagtccaaggccgggcgctttggctcgttcattctgttcttcgtgctgggcctgggcgtggccgcgttcatcatcaagagcgtggtgatcggcctgatcgagtccggcgccttataagcgcgctggtacttccttccactggccttggtccaggccgtcgatcgaccaatcgccaatccgcacgcgcaccaggcgcaaggtaggcaaaccgacagcagcggtcatgcgccgtacctggcggttgcgcccctcacgaatgatcagttccagccagtgcgtcgggacgcttttgcgaaagcgcacgggcgggttgcgcggccacagttcaggttcatccaactgtcgggcctcggcgggcaaggtcatgccgtcgttcagttcgacgcctttgcgcaggcgttgcaactgttcctcggtgggttcgccttccacctgcacccagtaggttttcgccagcttatgcttggggtcggcgatacgcgcctgtaattggccatcgttggtcagcagcaacaggccttcgctgtcacgatccaaacggcccgccgggtatatgccggggatatcgatgaaatccttgagggtcgcgcgcccgccttcgtcgctgaactgggtcagcacatcgaacggtttattgaacaggatcaacttcggctcggccggaggcgccttggcgacacgccgcgcagcggaatacggggttttcacgccagggcggcgcgaatcgggacgggtgggacgggacatggcaaaggaacatctaacggtcaggaccgacaatgctagtggcctgaccgttaaatgaccatcccaaccgcttagcggaacggcggctcgtcgaagctgcgcagtttgcgcgagtgcagcgagttgagttcggtgcgcagcaggtccaccgcctcgataccgatcttcaagtgctggctgaccgcacgctcatagaacgcgttggccgaacccggcagcttgatttcgctgtgcagcggtttgtccgatacacacaacaaggtgccgtacggcacccgcaaacgatagccttgcgcggcgatggtgccgctctccatgtccacggccacggcgcgggacaggttgatcagtgggcgttcctgggcccagcgcagttcccagttacggtcgtcgtaggtcaacacggtgccggtacgcaggcgttttttcagctcttcgcctttttcgccggtaacgttggcggccgcttgctgcaacgcaagctgcacttcagccagcgccgggatcgggatgttcggcggcaccacgcggtcgagaataccgtcgcggcgcatgtaggcgtgcgccagtacgtagtcgccgatggtctgggattggcgcaggccgccacagtggccgatcatcagccagcaatgtggacgcagtacggccaggtggtcggtgatgttcttggcgttggacgggccgacgccgatgtttaccagggtcacgccgtggccatcggtggcctgcaggtggtaggccggcatctggtaacggtgccacaccacaccggcggcaattgccgacgcctcaccgtgatccatgctcttgtcgatcaccacgttgcccggcagcaccatgcggataaagcgcgggtcgctgcgcagttgctccaggccatgcaggatgaactggtcgacataccggtggtagttggtcagcaggatccacggctgcacatggcgccagtcgctaccggtgtagtgcaccaggcggcgcagggagaagtccacgcgggccgcatcgaacagcgccaggggcagcgggtcggtgttttcccaatcgtacaagccatcggcgatgccatcggtggcggccgacaggtcggtgctcgggaatacgcgagccaaggtcgcagcggtaacgccggagccggccagttcatcgccctgctccaccacgtaggggtacgggatgttctgctggctcacgccgacttccacggtcacggtgaagtcgtgcatcagcggcaccagttgctccagcaggtatttacggaacgctgcaggatgggtgacggtgacactgtaggttcctggtagttgaaccttggcatacgcccgggtggtctgtgggacttcgccgtggcagtggtaagtcaggcgcagttccgggtagcgaaacagcgcacgttgtgcggcgtcgggctcgacgcggtctttgaggtattgcttgagggcttgattgagcgcgccagtggcacgctcatgcagggccgccagccggtccacggcttcttcagcggtttgaacgacaacaaaagcttcggtcacggtaagcatcctgtgttctgacttgcaggcctttatcttgcctgtatcccggcctcaccgaaacaccagagttggaatgcggtaaatgtgggagggggcttgcccccgatagctgactgtcagccaacacatctatcgctgacacaccgctatcgggggcaagccccctcccacatgtttaccgcattttagtccgatagattgggggtggaacgggtgacgagcgccgccacatccacaccacgaggcaaggtgccatagacccgagcggacgtttcgcccaaccgactggcgataaacccatcactgaccgccgcattccccgcctccagcaacaacttggcctgcaatgccacggcgatgtcttcggtgagttgccgcgcacggtactggatgtcctgggtgtccatgaacgccgacttgagctgttcgatatgccgcacaagcaacttgtcgccatgcccatcgcccagttcgacaaacagcgcctccagcacacccggctctttcgacaacgcccgcagcacgtccaggcactgcacgttaccggacccttcccacgtcgagttcaccggtgcctcacggtacagacgcggcaaaatgctgtcttcgacatagccggcgccgcccatgcattcagcggcctcgttgatcatcgccggcgcacgtttgcagatccaatacttgcccaccgccgtcaccagccgggcgaacttggcttcctgttcatcgtccagatgatccagcgcacggcccatgcgcaggctcagggccagtgcggattcgctttccagcgccaggtccgccagcacgttctgcatcaacggctgctcgctgagcacgcggccgccgaccgaacgatgggcacaatgatggctggcctgggtcagcgcctggcgcatcagggcgctggagccgaccatgcaatcgaagcgagtcatggcgaccatctcgatgatggtcggcacgccacggccttcttcgccgatcatccaggccagggcaccacggaattccacttcgctggaggcgttggagcagttgccgagtttgtttttcaggcgctggatgtagaactcgttgcgcgtgtcatccggacggtgccggggcagcaggaagcaggtgaggcccttgtcggtttgcgccagagtcaagaacgcatcacacatcggtgccgagcagaaccacttgtggcccaccagttcataggcctgccctggcccgcccgctcccaccggatacgcccgggtggtattggcacgcacatcggtaccaccctgcttctcggtcatggccatgccgatggtggcaccggccttgtgggcgatgccaacgttgcgcgaatcgtattgggtattgaggactttcggcagccagatgtcagccaagtcaggctgcagacgtagcgcaggcacacaggcgaaagtcatggtcagcggacagccggtgccggcttcggcctggctgtgcaggtaggtcatggcggcgcgggccacgtgggcgccggactgcggatgggcccaaggcagcgacggcaggccgtgttcgacagcggtacgcatcagttcgtgataagccgggtgaaactccacgaggtcgatgcgatggccataccggtcatggctgctgaacaccggtttgttctggttcgccaggaacccggcttccatcaatggcccgccggccaacgcaccgtaggcatcgatacgcgcttttgcccagccggcaccaaagcggcgcgaccattcctgcaaaggcaagtcgatacggtacaggttggtgccgtccagggacggcggctggttggtgacgtcgtgggtttcggcaaattgatgcaggttcatgacgggcctccaagaaaaaaggccacgttcagttgaggcctgcatttcagttaagcaccgtcataccccttaaaaaagtggcatacccgccgattgtccggcgcttttgccctctaaagggcgcaacaaccgacgctccaacaccgcctgcaatgcctcgaaacgcacaggcttggccaggcgctcggaaatcccgatgccatggcacccctcacgttccgacacattcagcgacgtgctcaaggcaatcactggtaattcgccacagcccggcagcgcacgaatctgacagcacaacgagaaaccaccctcgggaatatccaacagcactgcgtcgaaatccgccgcctgcaacgccgccaacgcgttcgggccgctgtccacggttttcacccggtaaccgagcttgagcagcatgccgcgcaccgccaactggccgacgctgttgtcatccaccagcagcaccgagcactcctggggcgcacgctgcttgtccggcgcaggcttggactcgggcgcgaccgggctgacctccacttccagctggaagcggctgcctttgcgcggctcggaatgatgggtaaggcgcccgcccagcagctcgatcagttgccggcagatggcaaggccgatgcccaggccgccgtattcacgggtggtggaaccatccagctggaagaagcgctgatacagggtggcttcatccaggaaagcaaagccgatcccggtatcggtgacgataaagctcaggcgcaagcgaccgtcgctgtggggcacgccgaccacacgcaggcgtaccgaaccttcgtgggtgaacttgaaggcgttatccagcaggcaatcgaggcactgcaacagtttgtcggcgtcgcccagcacacggtccggcagctcgtccgccacgtcgatggaaaacgccaggcccttgctctgggcgctggcgctgaactgctggcgcaaggtgtcgagggtaccgcgcaggctgaacacctcgggctgcgcaaccaggcgcccggcctgcaactcggtgagggtaaggataccgttgaccatgcgcatcatgtcccgcgccgagccggcggcggtttgctggtattgcgccaggtccgcatccagcggcacggtttgcatcagttcgagggagccgatcacgccgttcatcggggtgcgcagttcgtgggtcaaggtggcgaggaattcatccttgagtcggttgctgcgtgccaactgcaggttgagcacttcgagcttctggctggcgtcgaacaggatctgcgcctgttgctcacgcatggcattgatgcggtcggccagggccagggacaacagcgcgacttcgatcgccgaaccaatctggctggcgtacatggtcaggaacatattcggcaggtagcccagcaccatcagggtattgaccaccccgccgagcaggaacgccgaccaggcgatgatgaaatagcgcgccacccgctgcccgcaataccaggccttgatggccgcgacaaagatggtcacggtaaacaccagcgccaagccggtggccaggcgcagcgccagggcgtagctggtcatcaacgacagcagcatcaccacaccgccacacgccaccagcgccagcaacagacggttgatccagcgactgtgctgggccgtgtgcaggaagctgcgcgcaaacaggctgccgaacaacgctgccgagccaatcaggaacggcgtcgcggcattcgcccaccacgggttgtccggccagaagtactccactgccgcgccattgaccgacagctggtacatgccgaatgaagcgatatacaggatgtaatagaggtagctggtgtcgcgcacgctgagatagatgaacaggttgtacaccagcatgcccagcaacacgccatagatcaggcccaacacatacaggcgcagcggctgttgttccagatacgcggtgctggaccacagcgtcaaaggcgcctggatcgagccttcgctttgcaggcgcaggtagacggttttcgcttcgcccggcgtgaagtcgagtttgaacaggtagttgttctggcgaatctcacgggcggcaaacggcagcgcatcccctgtgcgcccggcgaggcgataggtgccggtgctgtcgggcaggtacaggtccagatggtcgaggggcgggtaggccagctccagcaaccaggtgcgttgggcttcaggattctggggcaggtagtgcagattgaccttgagccagaacaccgagcgcgaataaccagcattcagggtgtctttatcgtggggcttgaattgcgtgacagcggagggtgcgctgacatcggcgatggtgagggcatcggtcgggtcttcgagcacttgcagggctcgccccagcggcaggcttcgcgtgtcctggttgaactcgatggcgctggcgagcatcggcagcccgcacaacaataaaatcagcaaatagcgcatagagccccagcgtggcctgtccggttatgtcaaaaaagccccccattccttttgagaagacgtacaccggcaatacagttagtcgtttggatccactctagcatagccactaaaggctattagacaccattgaaataattttttgaaaggctctagaacggggctttcagcaattcgcatgcactcatttgggttgcagaaaccttccacccacggtgaaaatcctcctgtgcgcaacagccccgccaaaagcgtttggtggtaagctcgcgcaccatgaatatctacagctctcgccccgttgtcctctgtctctccggccatgatcccagtggtggcgccggcttgcaggcagatatcgaagccctgctcgcccagggttgccatgcggctccggccgtcaccgcgctgactgtgcagaacacggtcaacgtcagcgatttccgcgtgctcgaccgcgagtgggtgctggcccaggccaatgccgtgctcggcgactccgaagtggcggcggtcaagctcggcatgctcggctcgaccgcgatggtcgacaccgtggtcgaactgctgcaggcgcatccgcacctgccggtggtgtgcgacccggtgctgcgcgccggtggcggcggcagcctgggcaaggacgaggtcggttatgcgatgcgtgagcggctgttgccgttgtcgctgatcgccacgccgaacctgcccgaagcgcgcatcctcgccgaactgcccgaaggcaccgcagacgaatgcgccgagaagctgctgccctatataaagcacctgctgatcaccggtggacatggcgacgagcacgaagtacacaaccgcctctacagccgcgacggcacgcgccagacctttacctgccaacgcctgcccggcagttaccacggttcgggctgcacgctggccagtgccctggcaggtcggatcgcccagggcgaaggcctggtgagcgccgtgcagtctgccctcaactacacttggcgcaccctgcgtgacgctgaacaactcggccagggccagttcgtgccgcgccgtctgccgctggatttctgctcttaacagcacgaggcctgcctgatgaaactacgtggcctttacgccattaccgacagccaactgttggccggcaaattccttgcctacgtcgaagcggcgctggacggtggcgtgaccctgctgcaataccgcgacaaaagcagcgacgaagcccggcgcctgcgtgaagcagaaaagctgcgggagctgtgctcgcgctataagactcaactcattatcaacgacgacgccgaactggccgcgcgcctcggcgtcggcgtgcacctgggccagaccgacggcccgctgaccccggcccgcgccctgctcggttccaaggccatcatcggttctacctgccacagccagatcgaactggccgagcaggctgccaaggaaggtgcgagctacgtcgccttcggtcgcttcttcaattccagtaccaagcccggcgcccctgccgccaccgtcgaaatgctggcccaggcccgtgcgcgcctgcagctgccgatctgcgtgatcggcggcatcaccctggagaacgccgagcccctggtggcccacggtgccgatctgctggcggtggtgcacggcctgtttggcgccgacacaacccaggaagtcacgcgccgcgcccgtgcgttcaacgaccttcttagaatttcagtttagagagcccgatcatgtcccgttccgaaacgctgtttgccaatgcccagaaacacatccccggcggtgtgaactcccccgtgcgtgcgttcaagagcgtgggcggtacgccgctgttcttcaagcatgccgaaggcgcctacgtcaccgacgaagatgacaagcgctacgtggactacgtgggctcctggggccccatgatcctcggccacagccatccggacgtgctggatgcagtgcgcaagcaactggaacacggcctgtcctacggcgcaccgaccgccatggaaaccgagatggcggacctggtctgctcgatcgtgccgtcgatggaaatggtgcgcatggtcagctccggcaccgaagccaccatgagcgcgatccgcctggcccgtggtttcaccggccgcgacagcatcatcaagttcgaaggttgctaccacggccactccgacagcctgctggtcaaggccggctccggcctgctgacccagggcgtgccaagctcggccggcgtaccggctgcgttcgccaagcacaccctgaccctgccgttcaacgacatcgtcgccgtcgagcagatgcttaatgaagtaggccaggacgtggcgtgcatcatcgtcgagccggtggccggcaacatgaactgcgtgccgcccgcgccgggcttccttgaaggcctgcgcgagcagtgcgacaaacacggtgtggtgctgattttcgacgaagtgatgaccggtttccgcgtcgccctcggcggcgcccaggcgcactacggcgtcacgccagacctgagcaccttcggcaagatcatcggcggcggcatgccggtgggctgcttcggcggcaagcgcgagatcatgcagcacatcgcgccgctgggcccggtataccaggccggtaccttgtcgggtaacccgctggccatggccgccggcctgaccaccctgcgcctgatcagccgcccaggcttccatgccgagctgaccgactacaccacacgcctgctcgacggcctgcaacagcgcgccgatgccgctggcattccgtttgtcaccacccaggccggcggtatgttcggcctgtatttcagcggtgccgacgatatcgtcacctttgatgacgtgatgggcagcgacgccgatctgttcaagcgcttcttccacctgatgctggaaggcggcgtgtacctggcaccgagcgctttcgaagccggcttcacctcgattgcccatggcgaagccgagctgaaactgaccctcgacgccgctgaacgcgccttcgccgcactgaagtaataggctgcgaacatccggcaccgcgcaaacggtgtctgatttgctactttgcttacagatatttccgagtttttccgagaattcacctgcaatccggcagataacttgcccaagcagcagaaaaacgagtaaagactttgtaagcagaggcctgcttatttcataatgcgcgcttattggatcccccgagggtccgcgtgccccgtcagaggtaagtcgattcccatgaaacgcaccggccgcaccctggttctgggctgcctgttgctccttcagccgctgctggcacatgcacaagcaggcggcaactcgttgttaatcccagcgatgggtcgttgcaccctcaatacccagccagacagccaggccgaagctctgagcgcgtgccagaaacaggccgacggcggggatgcgcaggcgcaatacgagttgggcgagtacttccacgacagcaagaaccccgcccgcgacctcaacaaggccttgagttacttcgagaaagcttcgttgcagggccatgcccaggcgcaattccagttgggcaacatgttcttcaagggcgaaggcgtgccagccaataacgtccaggcgtacatcgtgctgaaaatggctgcggtcaacggcgctgaagacgcgctggacacggccgacgaagtagccgagcacatgcagcgcgatgaactggaagtggcgacccaggtgctgggccagattttccgcaactaccttctggaactgcagagcgccgatgggcgttcgcccttctcacccctgccctgacagccgccttacttctccggcataggcatcggaaatggcatcacattgctggtgccccgtgcctcgctgatcttcggcgtgcccaggcgctccacctcatcgatgcgcacaatcgaatgcatcggcacaaaactgcgcaccacgccttcgaactgtgccttgagcttctcttcgcccgggtcgacgaccaactgggtgcgctcgccaaagacgaactcttccacctccaggaaaccccacagatcgctctgatagatctgcttggcgtacatttcgaacacctggccctggttgaggaaaatcaccttgtagattggagcttcacgtttggtcatggtgggcgaacaacacatcggggatataaaagagggcgcgaactatagcatggcacccgatgcacaacgctaggaaccaatgggcatgccccctataatgcgcggttctttaccaccagttgacgattcccatggccaagaagctttacatcgaaacccacggttgccagatgaacgagtacgacagctcgcgcatggtcgatctgctgggcgaacaccaggccctggaagtcaccgcccgcgccgaagatgccgacgtgatcctgctcaatacctgctcgatccgcgagcgggcccaggaccgtgtgtactcgcagctgggccgctggcgcgaattgaaactggccaacccggacatggtgatcgccgtcggcggttgcgtggccagccaggaaggcgccgcgatccgcgaccgcgcaccctatgtcgacgtggtcttcggtccacagaccctgcaccgcctgccggaaatgatcgatgccgcgcgcgtcaccaagctgccgcaggtggatgtgtcgttcccggaaatcgaaaaattcgaccacttgcccgagccgcgtatcgatgggccaagcgcctacgtgtcggtgatggaaggctgcagcaagtactgcaccttctgcgtggtgccctacacccgcggtgaagaagtcagccggccgtttgacgatgtgctgtcggaaatcatccacttggccgaaaacggcgtgcgcgaagtgaccctgctgggccagaacgtcaatggctaccgcggcctgaccgaggacggccgcctggccgacctggcagagctgatccgcgtggtggcggccgtggacggtatcgagcgcatccgctacaccacctcacacccgctggagttctccgacagcctgatccaggcccacgctgaagtgccggaactggtcaaacacctgcacttgccggtgcaatcgggctcggaccgcattctggcggccatgaaacgcaaccacacggccctggaatacaaatccaaactgcgcaaattgcgcgcagcggtaccgggcatctgcatcagttcggactttatcgtcggtttccccggcgagaccgagaaagatttcgagcagaccatgaagctgatcgaagacgtcggtttcgacttctcctactcgttcgtctacagccagcgccctggcaccccggcggccgacctggcggacgagaccccggaagcgctgaaaaaagagcgcctcaatgcgctgcaacaccgcttgaaccagcagggtttcgagatcagccgacaaatggtcgggtccatccagcgcatcctggtcaccgactattcgaaaaaagacccgggcgaattgcaggggcgtaccgagaacaaccgaatcgtaaacttccgctgcgataatccgaccctgatcggccagtttgccgatgtgcatatcgatgcggcgcaaccgcactcgttgcgcggatcattgttgcaataatgacctgattaacagcgactcaatgtgggagggggcttgcccccgatgacggcgtgtcagacacagatgttttatctgaaccggcgctatcgggggcaagccccctcccacattttgaccgtgcaacattccgatgacgtaagtgctttcgcacacgggcagctggcgttattctctatttcacctcaacagccaaagggcggctaaaaacaaccttgaacgcacccatcgcagaaccccatcgttttctcctcgagccgtttgaggctcgccgtttcgccaatctgtgcggacagttcgacgagcacctgcgcctgatcgaacaacgcctgagcatcgagatccgcaatcgcggcaatcagttcgagctcattggtgaaccccaacacaccacgtccgcagaaaacctgctgcgccgcctctaccgtgaaaccaagggtagcgagctgtcgccggaaaccgtgcacctgtacctgcaggaatcggccgtggaagacctggccaacaaccccgtggccgaagccagcgtggccctgcgtaccaaaaaaggcatgattcgcccgcgcggcttgaatcagcagaagtacgtcaaggaaatcctcggcaacgatatcaacttcggcatcggccccgccggtaccggcaagacctacctggccgtggcctgcgcggtcgatgcgctggaacgcgagcaagtgcgccgcatcctgctggtacgcccggcggtcgaggctggcgagaagctcggcttcctgcccggcgacctggcccagaagatcgacccgtacctgcgcccgctctacgacgcactgtacgagatgcttggcttcgaatacgtggccaagctgatcgaacgccaggtgatcgagatcgccccgctggcctacatgcgcggccgcactttgaacaacagcttcatcatcctcgacgaaagccagaacaccacggtcgagcagatgaagatgttcctcacccgcatcggtttcggctccaccgccgtgatcaccggcgacatcacccaggtcgacctgcccaagggcactaagtcgggcctgggccaggtgatcgaggtgctcaaggatgtgccgggcatcagctttacgcacttcatgcccaaggatgtggttcgccacccgctggtacagcgcatcgtcgaggcctacgagcgtttcgagcaccgtgacgatgggttgtccaaggacgttcgccgcgatgcttgagctagacctgcagctggccaccgaagcgcccgcccccagtgaagcccagttccgtcagtggtgcgccctggccctgcgccagcgcagcgccgactcggaactgactattcgcctggtcgatgagcccgaaggccgcgaactgaaccacacctggcgccagaaggattacgcgaccaacgtgctgtccttccccgccgacgtgccggatgagctgctggatatcccgttgctgggcgacctggtcatctgtgtcgcggtggtggagcgcgaagcgaaggaacaaggcaaggaacttgaggcccactgggcccatctagtcatccacggctgcttgcatctcttgggttacgaccatatagacgatgacgaagccgaggaaatggaaacactggaacaaacgttgcttgcagaattgggtcatcgggacccgtatgccgacgacgaagcttaaaaacactcaactgtaacaataaaggattcagagtaatcgctatgagcgaagaccgatcgagcaacgggcagaagtcatggctgggtaaactgacccaggcttttgcccacgagccgaaaaaccgccaggagctgctggagctgctgcgcgaggcccatcagaacaagttgctggacagcgaagcgctggccattgtcgagggcgccatccaggtggctgacctgcaagtgcgggacatcatggtcccgcgctcgcagatgatcagcatcaaggcgacccagaccccacgggagttcctcccggccgtgatcgactcggcgcactcgcgctacccggtgatcggtgaaagccatgacgatgtcatgggcgtcctgctggccaaggacctgctgccgctgatcctcaaggagaacggcgacagcttcaacatcaaggacctgctgcgcccggcgaccttcgtgcctgaatccaagcgcctgaatgtgctgctgcgcgaattccgcgccaaccacaatcacatggccattgtgatcgacgaatacggcggcgtggccggcctggtcacgattgaagacgtgctggaacagatcgtcggcgatatcgaagacgaacacgacgtcgaagaagacagctacatcaagccactgcccagcggtgacttcctgatcaaggcgctgacgccgatcgagaacttcaacgagttcttcgacagcgaattttccgacgacgagttcgacaccgtcggtggcctggtgatgagtgcgtttggccacctgccaaaacgtaacgaaaccaccgagatcggcgcctatcgcttccgtatcctgaatgccgatagccgtcgcatccacttgatccgcttgacccctattgcccgctaaggactgacatgcgccgtctcaccgctcccggctggcccggtaatttgctggccgtggtggccggcgccatcactaccctggcgctggcgccgttcgacctgtggccgtttgcgctggtcgcggtcggcttgttctatgtggggctgcgggacctgagcccacaccaggccctgggtcgtggctggtgtttcggcttcggcctgtttggtgccggcaccagttggatctactacagcatccaccacttcggcggcgcttcggtgttgctggcggggttcctgatgctgttgttcaccgccgccatcgcctggttcttcgccctgcccgcctggctgtgggcgcgctggttgcgtcgcaatgaagcgccgctggcggatgccttgaccttcgcggcgttgtgggtcggccaggaggcgtttcgcggctggttccttaccggtttcccgtggctgtactccggctacagccaactcgacggccccctcaccggcctcgcgccgctgggcgggatgtggctgatctcctttgccctggcactcaccgccgccctgctgtgcaacctgccgcgcctgctggccggcaagcgcaacgcctttatcggtgccggcctggtgttgctggtcgcgccttgggcgatcggcctggcgctcaagcatcacgcctggaccagtccgtccggcgcgccgctgagcgtggccgccatccagggcaacgttgaacagagcatgaagtgggacccggagcagctcaacgcgcagctcgcgctgtatcgcgacatgagcttcagttccaagcgtgtcgatttgctggtatggccggaaacggcggtgccggtgctcaaggagtctgtcgaaggctacctgggcatgatgggcaagttcgccgccgaccggcacaccgcgctgatcaccggggtaccgatccgccaggaagtgcaccaccagaagcgctacttcaatggcatcaccgtggtcggcgaaggcgacggcacctacctcaagcagaaactggtgccgttcggtgagtacgtgccattgcaagacatgctgcgcggcctgattgccttcttcgacctgccgatgtcggacttcgcccgcggcccctcggaccaggcgatgctgcaggccaagggatatcagattgcgccgttcatttgctacgaagtggtgtacccggaattcgccgctggcctgtcggcgcagagcgatctgctgctgaccatcagcaacgacacctggttcggccgctccatcggcccgttgcagcacctgcaaatggcgcagatgcgcgcgctggaagccgggcgttggatgatccgcgccaccaacaatggcgtgaccggcctgatcaacccgttcgggcagatcaccgcgcagatcccgcaattcgagcgcggcattctctacggcgaagtggtgccgatgcacaacctcacgccgtacctgcaatggcgttcgtggccgttgattatcctgtgcctggggctgttcggttgggcgctgctggcgggccgcatgtccaaaaccgtctgacagacaacccaaaaccaatgtgggaggcggcttgcccccgatggctgtgtatcagtatcagatgtactgactgacactctgctatcgggggcaagccccctcccacatgttgatctgccgcgttatcggtagaacaaccgatagcccacctgccccaccgcttcgttgatcaactgcccgctgcgccacactgagacgaactccggcatccagccacccagtggcctggcgttgtccacgcccaggaaccccaccggcgccggcaccacggtaaagccggctctctcaaagctccacaccgaacgcggcatgtgccaggcctgggtcaccaccaccacgcgcttgatgccttcgggcaagagaatctctgcgctcatctgcgcgttttcccaggtagttcggctgcgctcttccttccagcgcaccgtcacaccgaagtcatcctgcatcgacaccgccatcagctccgcctcgctaggcggtgtgccgtaatgcaggccgccggtcgtcagcaccggcagcccggaggccttggccaatcgtgcggcatagcgctggcgctccaggccggtacccgtcggctggtcggtgccccaggccgggtcaccgcgctcacgcccggagcccaacaccacgatcgcatcggcgcgttgcgccagcgtcgaccaatcttcccgcgccaacggcggctcagtctccagggctcgtgcgccccactccaccatcaccggcaggctgatcagccacataccgccaaaccccagcgcaaagcagcaacccgccaagcgtggccggctacgccgaaaccaccaggcaagggcgagcagcagcaagagaatgccgggcggcaggagcagttgtttaatgaagtaacgaataggcatcgggcatctccaaagatgcccgaagcctaaggtgtaacggggtttagcgacaatctttaccgtgacatgacgcgaaggtgttgctctagggggagtgaactacttgtagcgtacgaagcggcgtttttccgggccgcgaccgaccgacaagtccttgagccacaccaccttggcagagtgcgtgggctccttgggtggcggggttgccaccagaggaggcgcaccgcgcccattccgctccagataagccttgatcagttccaactccgcgcgggtcaaaccgcgcagttccaactccacaggccgttcatcacgcaatcggcccgctgtcctcgctgcatccaatgcacgacccaatcggtcgatcagtccttcgtagatttccggtttcgttacgattcgctgcgattcaaccatcccctcacctcattgaagaaagacttgctccccaataaacagcgtagcccccgtggctgcgcctgcccggcgccgcgacagacggccctgccagagcaatcagggtttccctcgatagagtggggtcatgtatgctacggcgcttcctgtaactccacttcccgcagggtttgggcacggacgcgccgctttttggtgtcgatcaacctgaatgttgcaccgaagaggattaggccacccctattcagttcaaaagtagccatgcacgaacaatatcagccccgtgaaatagaaaatgccgcccaaaccttctgggacgagcaaaagtcctttgaagtcagtgaacagccaggcaaggagacttactactgcctatcgatgttcccttaccccagcggcaagctacacatggggcacgtgcgtaactacaccatcggcgacgtgatttcccgttaccagcgcatgcaaggcaagaacgtcctgcaacccatgggttgggatgccttcggcatgccggcggaaaacgccgcgatgaaaaacaacgtggcccccgccaagtggacctacgaaaacatcgcctacatgaagtcccagctgcgcagcctgggcctggcggtggactggtcccgcgaagtcaccacctgcaagccggattactaccgctgggaacaatggctgttcacccgtctgttcgaaaaaggcgtgatctacaaaaagagcggcaccgtgaactgggacccgatcgaccagaccgtccttgccaacgagcaagtgatcgacggtcgcggctggcgctccggcgcgctgatcgaaaagcgcgaaatcccgatgtactacttcaagatcaccgcctacgcggatgaactcttgtcgagcctcgacgacctgccgggctggccggaacaggtcaagaccatgcaacgcaactggatcggcaagtccaagggcatggaagtgcagttcccgtacaacgtcgactcgatcggcgcagcgggcgcactgaaagtcttcaccacccgtccggacaccctgatgggcgcgacctacgtcgccgtggctgccgaacacccgctggccacccaggctgcacagaacaaccctgagctgcaggcgttcatcgccgaatgcaaaggcggcagcgtggccgaagccgacgtcgccacccaggagaaaaaaggcctgccgactggcctgttcgtcgagcacccactcaccggtgaaaagctgccggtgtgggtcgccaactacgtgctgatgcactacggcgatggcgcagtaatggctgtgccggcccacgacgagcgtgatttcgaattcgccaccaagtacaacctgccgatcaagtccgtggtgcgcaccagctcgggcgacaccaacccggccccgtggcaagacgcctacggcgagcacggcacgctgatcaactccggcgagttcgacggcctggatttccagggtgctttcgacgccatcgaagttgcgctggtcaagaaaaaccttggtgcctcgcgcacccagttccgcctgcgcgactggggcatcagccgccagcgctactggggctgcccgatcccgatcatccactgtgaaagctgtggcgacgtgccagtgccggaagaccaactgccggtcgtcctgccggaagacgtggtgccggacggcgccggttcgccattggcgcgcatgcccgagttctacgagtgcagctgcccgaaatgcggcgcgcctgccaagcgtgaaaccgacaccatggacaccttcgtcgagtcctcgtggtactacgcccgctacgcctcgccgcactatgaaggcggtctggtagagaaatccgcggccgaccactggttgccggttgaccagtacatcggcggtatcgaacacgccatcctgcacctgctgtacgcgcgcttcttccacaagctgatgcgtgacgaaggcctggtgagctccgatgagccgttcaagaacctgctgactcagggcatggtggtcgccgagacttactatcgccgcgaagccaacggcgcttatacctggttcaacccggccgacgtcgagcttgagcgcgacagcaaagccaaggtcatcagcgccaagctgatcgccgacggcctgccggtggaaatcggcggcaccgagaagatggccaagtcgaagaacaacggcgtcgacccacagtcgatgatcgaccagttcggcgccgacacctgccgcctgttcatgatgttcgcctcgccgcccgacatgagcgccgaatggtccgactccggcgtcgaaggctcgcaccgtttcctcaagcgcgtctggcgcctggcgcacgctcatatcagccagggcctgccgggcaaactggacgtggccgccttgagcgacgagcagaaactcattcgccgcagcacccacctggccatcaagcaagccagccaggacgtgggtcagaaccacaagttcaacactgccatcgcccaggtaatgacgctgatgaacgtgctggaaaaagcaccacaagccactgagcaggatcgcgcactggtacaggaaggcctggaaacggtcaccctgctgctggcgccgatcacgccgcacatcagccacgacttgtggaaccgcctgggccacagcgacgccgtcatcgatgcgcgctggccggtacaggatgacagcgccctggtacaggacacgctgcaactggtgatccaggtcaacggcaaactgcgcggccagatcgacatgccggccactgccagccgcgaagacgtcgaggcggctgcccgcgtcaacgagaacgtgctgcgctttaccgaaggcttgacgatccgcaaagtgatcgtggtgcctggcaaactggtcaatatcgtcgcgagctaatcggatcgggcgcagggcgtaaaccctgcgtcgaacaaagccttcagggcctcgacaaggcccacatggtttcaaggggagcaacaaaatgattaaacgcaatttgctggtgatgggccttgccgtgctgctgagcgcttgcggcttccagctgcgtggtaccggcaccaatgacctgacgatcaaggaactcgacgtcagcgcccgcaacgcctacggcgatacggtgacgcagttacgtcaggtgctggaaaacagcggcgtgcacgtttataccggcgcgacgtacaaactgttcctggtggacgagcgagaaacccagcgtaacctgagctacgccagcgccgggcgtgcgtccgacatcgaactgaacactgcgctcaacttcgaaatccagggccgcgatcatctgccgctgatgggtgacaagatccaggtgcagaaagtggtcagccatgatggcaacaacctggtgggttcggactccgaaatccagcaagtgcgcaaggaaatgcgtcgcgaactggtacagcgcatggtgctgcgcctgtcgatgctgactccggaacaactggagaccctgcagcaacaggctgacaacaaggccaaggccgacgccgacgcgctgaaagctgccaaagagtacgaagacaacacgccgaaacagtcgcctgttgaagtccctgtcgagtaagccggacggggcgccccaaacgccccgtttaccctgcctatgaaactcgcccccgcccaactcgccaaacacctgcaaggtggccttgcgcctgtctacattgtcagcggtgatgatccgctgctgtgtcaggaagccgccgacgccattcgcactgcggcacgccagcaaggtttcgacgaacgccaagtcttcagcgccgacgccagcttcgactggggcacgctgctgcaggcgggtgcgagcatgtcgctgtttgccgagaagcgcctgctggaactgcgcctgccttcgggcaagcctggcgacaagggcgcggccgccctgatggaatactgctcgcgccccgccgaagacacggtattgttgatcagcctgcccaagcttgatggcagcgcgcagaaaaccaagtggggcaaggccctggtagaaggcgcacagacccagttcatccagatctggccggtggacagcagccagttgccgcaatggattcgccaacgcctgtcccaatcggggctgtcggcaacccaggacgcagtggagttgatcgccgcccgggttgaaggcaacttgctggccgctgcccaggagatcgaaaagctcaagctgatggccgaagacgggcagattaccgtcgagaccgtccagggcgccgtggccgatagcgcgcggttcgatgtgttcgggctggtggatgcgatcctcaacggcgaacccgctcacgccttgcgtatgctcgaaggcctgcgcggcgaaggcgtggagccgccggtgattctctgggccctggcccgtgaactgcgggtgctggccaatattgccctgcaatatagccagggtacgccgctggacaaatgcttcagccaggccaagccaccggtgtgggacaagcgcaaacccttgatgagcaaagcgctgcaacggcactcggcgcaacgctgggcacaattgctgctggaagcgcagcgcatcgacgcgcagatcaagggccaagccgctggttcgccttggatgagcctgagccgtttatcgttgctgatggccggccagcgcctgacattgccggcagaatagtcctacctctcgaagggctttacagcggcgcaacatcggcagatgatttgcaccgcttccaccacccaacgagagtaacgaccatgagcaaaaagccatccaagcatggccccaacaaggccaaatccatcatcgcccagccactgttccgcagccgtcaggaacgcgccggcaagggcaaaggcagctaccgccgcgaagccttccagtctaatagctgggaggcttcttactttctggctgcctgaaggcaagcagccctctggcatgataaggtctgcacctgatttgcaatccctggacctgtgcatgccctctagtctttcccgtcgttggcactttcgccaactgatcgctgcctccagcctcattctgctcgtcgcctgcgcggagaaacccaccgccgccgacgctcaaccgctgcccaagctccagaccgcccctgtggttgcgcccgccgtcgtggccccgctggccgtggacaatcttgatatccagccgacccagaccttcgccgaatggcaggcggccttccgcgtgcaagccctgcaggccggcatcaccgccgccgtattcgacaacgcatttgccaacgttacccccgacatggcggtgatccgcgccgaccgcagccagccggaattttcccgcccggtgtgggaatacctcgacggtgccctgtcgcccgtgcgcgtgcgcaacggccaggcgttgctggtcaagtacgccgacatcctgcaaagcatcgaacagcgttatggcgtcgaccgccaggcgctggtgtcggtgtggggcatggagagcaacttcggccagttccaaggcaacaactcggtgatccgctccctggcgaccctggcctacgaaggccgccgcccggcatttgcccaggcgcaactgctggcggcgctgcagatcatccagcacggcgatatccaggccgaccagatgaaaggctcctgggccggcgccatgggccagacccaatttatcccaaccacctacaacacccacgccgtcgacttcgatggcgacggtcgccgcgatatctggaacagcccggcagatgccctcgcctccaccgcgcactacctgcaaagctccggctggcagaaaggccagccgtggggttttgaggtgaaacaattgccggcgaacttcgactacgccctggccgatggcggcatccgcaagacggtcgcagaatggctgaaactgggcatccaactgccaccgggtgccagcctgccacccaacgtcgaccaactctccgctgccctgctgttaccggccggttatcgcggcccggcgttcctggtgctggataacttccgtgcgatcctcaagtacaacaactcgtcgtcctacgctttggcggtcggcctgctgtcggaacgtttcggtggcggcggcgtgattcgtggcgattggccgaaagatgaattgccattgagccgctcgcagcgcatcgacttgcagacggccttgagtgccaatggctatgacgcgggcaaccctgacgggattatcggcgccaatacgcgtaaggcgattcgtgcggcgcagcaggccttgggctggccggcggatgggtatccgacggtgaaactgctggagtcgttgcagagccgctagatcggcatatggcggctattgctatcgggggcaagccccctcccacatttcgacagcattccattgtgggagggggcttgcccccgatgacggcctgacaggtcgcaaaaactcaggctttgaacactacatcctgctccaacaccacccgctgctcccccgcatccaaccgcaccaacgcgcccatcggcaacgtcaggttcgggtcgcaatgcccactgcgccaaccggacaacacggggatgcacagcggctcgaaggtctgcttgagcaagcgctccaacgcaaccttatccacacccgccacgtcccctaccagtacaccggcgacctgcgccagcttgcctgccaggcgcaggtgcgtcagcaggcggtcgatgcggtagatcggctcgttgacgtcctcgatcaacaggatgatgccttctgcgtcgatctcaaagggtgtgcccatgactgccgcgatcatcgacaggttgccgcccagcaagcgcccacaggcgatgccaggctcgattgtggtcagcgggtacgccaccgggtgcatcaactcgctgccagcgcccaactggccgcgcagcaggctgaacaatgaagactcggtaggctgttgcttgtcgcccaacagatcggcgttgagcatcggcccgtggaaggtcacgaagccggcgtaacggctgattgccaggtgcagcgcggtgatgtcgctgtaacccacgaagggtttggcattggcgcgcagcaggtcgaagtccaggctatcgagcaggcgcggcgtgccgtacccaccacgcaggcagaagatggcgtcgatttcagggtcggcgaaagctttgtgcaggtcgttgaggcgggttttatcgctgccggcgaggtagccatcgcgttcatagacacccgggaagatgcgcaggtcgtagccgcgggcgcgcatccattggccggctttttcgacgtccagggtggcggggccggcgggggcgatcagggcgatggtgccttcgctacggagggcaggtactgcagcggtcatccacgactctccttggctaacgcgaaacaactgtgggaggaggcttgtccccgatggcggtgtatcagtatcagaagtgctgactgacagtccgctatcgggggcaagccccctcccacattaacctgcggtgccgctcacagcgctatcaggaaaccaggctcgccttgaccagcttggcctgctcgtccgcatggtacgaggagcgcaccagcgggcccgacgccacgttcttgaagcccatcttgtagccttcctcggcgaaccaggcgaaggtgtccgggtgcacgaaacgctgcaccggcaagtggctgcgggacggttgcaggtattggcccagggtcagcatgtcgatgtcgtgttcgcgcatgcgcttcatgacttcgatgacttcttcgtcggtctcgcccaggcccagcatcaggccggacttggtcgggatgtgcggcatcatctgcttgaatttctgcagcagggtcagcgaccactggtaatccgaacctggacgcgcagccttgtacaggcgtggcacggtttcgaggttgtggttgaacacatcaggcggctcggcggcggtgatttccagtgccacgtccatacggccacggtagtccgggaccagggtttcgagcatcacgttcggcgacagcttgcggatttcgcggatgcagtcggcaaagtgctgggcacccccgtcacgcaggtcgtcgcggtctaccgaggtgatcaccacgtacttgaggcgcaggtcggcgatggcgatggccaggctctccggctcgttgacgtccagtggcttcggacggccgtggccgacgtcgcagaacgggcagcgacgggtgcagatgtcacccatgatcatgaaggtggcggtgccgccggagaagcactcgcccaggttcgggcaggaggcttcttcgcacacgctgtgcagtttgtgcttgcgcagcagcgccttgatacggtcgacttccggcgaaaccgggatgcgcacgcggatccagtcgggtttcttcggcaattcggtggtcggaatgatcttcaccgggatgcgtgcaaccttctcggcgccgcgcagcttgacgccggcttccaccttggcacgcggggccggggctgggcgttcggtaacgtccaccgtcgggatcatggtttgcactgcatcagtagtcataatcagtcgattccgcccgtaagggtcgtctgctcagcatagtcgaggtgtttgacgagctgcgcacgcagccgggcacttacctcggcaaatttaatcggtgtggcgtggtcactcagttgcgtcattgccaacccggcatagccacacgggttgatccgccggaacggcgccaggtccatgtccacattcagggccaggccatgaaaggaacagccgtggcgaatccgcagccccagggaggcgattttcgcgccatcaacgtacacacccggcgcatccggcttggctgcggcgctcacgccgtaactggccagcagctcgatcaggcaagcctccatgcggctgaccaggtcgcgcacgccgaaccccagcttgcgcacatccagcagcaagtaggccaccagttgacccggcccatggtaagtcacttggccacctcggtcgacctgcaccaccggaatttcccccggcagcagcagatgttcggccttgccggcctggccctgggtgaacaccggcgggtgttccaccagccagatttcatcgggggccgaggtgccgcgctcgttggtgaagcgctgcatggcgtgccagacgggctcgtagtccatccggccgagctcgcgaaagcccaggacctgtgacatcacagcaccatgtgcacgaagccggtggcccgcagttcactgttgatgttgtagagctggtcctgatccgtcgcaacgatgtgcaactggatcgtggtgtatttgccggttgaactggagcgttcatccacgcgctgatcgttgatcgtggcgtgtttacgcacgatctcaaggatcaggtctttacggccgacaccggtatcgctgatcaccttgatgggatagtccaccaccgggaattcgatctttggcgcctttacttctttatcggtcatggcgtaacggcctcgtaagcgtaagccgtggcgacgggcaaagccccgtgtcggatcaacacggggctttgcaggtgcacacaatcagttgaacaggctgtagaagaatagacggatgctatcccacacgcggcggaagataccaccttcgtcgacagcgtccagggcgatcaggtcggcgctgtgcaccaccttgtcgtccagcttcacttcgactttaccgatcacgtcgcccttggcgatgggcgcaaccagttgcgggttcatggtcatgctggcagcgagcttcttcagctggcctttaggcatggtcagggtcaggtcttcagccaggccagccttgacttgagaggtcgcgcctttccacaccggcgcggtcgccagttcagcacccttctggtagaaggtctgggtttcgaagaaacggaaaccgtaggtcagcagcttttgcgtctcggccgcacgggcctgttcgctgttggtgccgaagaccacggcaatcaggcgctggccgtcacggacagcggacgacaccatgcagtaaccggcttcttcggtgtggccggttttcagaccatcgacggtcttgtcgcgccacagcagcaggttgcggttaggctgcttgatgttgttccagaagaattccttctgggagtagatcgcgtagtgcaccgggtcgacacgaatgatcgcgcgcgccaggatcgccatgtcgtgagccgacgagtagtgctccgggttcggcaggccggtcgggttcatgaagtggctgttggtcatgcccaggtcggccacggttttgttcatcatgtcggcgaatgcatcttcgctgccggcgatgtgctcggccagcgcgacgctggcatcgttaccggactggatgatgatgccgtgcaacaggtcgctcacagtcacctgcgaacccaccttgatgaacatccgcgaaccgccggtacgccaggcgttttcgctgacggtgaccgggtcgttctcgccgatctggccgcgacggatttccagggtcgcgatgtaggcggtcatcagtttggtcaggctggccggtggcaggcgctggtcaccgttgttctcgaccagcacgttgccgctggcggcatccatgaggacccaggccttggcagccagttgcggggaagccggcaccatttcaaccgcccaggcggccggggtgatgatcagcgaaagaagcaggcacgtgcgtttggctaaggtggtgatgttcatccgtctctcgaaattgcttatggaaacttgccctcgcgggcaaaacttattcagacagcccgctaccagactgtcacgtgttcggttgcccgctcaccccttgcccccgggtttttattgttcaacgagccaacaaccagggttcaagcccgcgcacgggccagaaccatcaattctgttttattcagcggtgaccacgctaggctgacccagattggccaggcgcacgctgttctgcacttgcgccacttcgctcggcgagccgatcgggcccatgcgcacacggtgcaacgtctgctggttacgcacgatggagctgatgaacaccggcgcgctgaccatgctgctgagcttggaccttaacagttctgccgcatccgggttggcgaaagcgcccacctgcaagtattggccaccggccagcgaagcaccctgggcagcctgcggcactgccacggtgtccggggcgtgctgttgtggcggcggtgtccactgctcgaccttgcccgccgatgcggtgatttgcggttgtggtgtctgcggctcgttgagcatcaatggcgccggcttgccgcgctgggcccagtactgcgccgggtcgatgccttcgaccttgacccgtgcggtgccggtttcggcgtagccgagtttcttcgcggcggcgtaggacaggtcgatgatgcggtccgagtaaaacggcccacggtcgttgacgcgcaggatcaccgtgcggttattgtccaggttggtcacccgcacataactcggcagcggcaacgtcttgtgcgcggcactcatgccatacaggtcatacacttcgccattggcggtgttctggccgtggaacttggtgccgtaccaggacgccgtgcccgattgcacgtaggtcttggattcctgcagcgggaaataggtcttgcccagcacggtgtacgggttggccttgtaggcaccggtgtgcagggtgggcgtggcgtccgggatcttcgacacatcgacatcccaccacggcgctccgtctttgtgcgcacggttgatgtccaggcccggctgggaacgaactgcggtgcccccggacttctgcgccggaccgcggctggtggagcaactgacgaccagcagggacaacgcgacgaacgccaccagcttgagcggttgattgaacggcgatgcccgcattacttagtgccccgtgcttggaccagcatgtctgacagctgatgtacggccatggcgtacatcacactgcggttataacgcgtgattgcgtagaaattcttcaggcccatccagtattccgggccgttttcgccctcaaggcggaatgccgtgaccggcatctcgtcaggcagcgcattctgactcgaccagcccagcgcccgcaactccccgaccgtcttggccggctcgatgccctgcgtcaggccttcgtcggcgcgatcgcccgtgacatccgcacgtatcaccaccggctcaccggcgacccagccatggcgcttgaagtagctggccacgctgccgatggcgtcgtcggggttgctccagatattgatatgcccgtcgccgtcaaaatccaccgcataggcgcggaagctgcttggcatgaactgcggcaagcccatcgcaccggcgtaggagcccttgagggtcagcggatcgacctgctcttcacgggccaacagcaggaattcgcgcagttccttgcggaagaactcggcgcggggcgggtaatcgaagcccagggtcgacaaggcgtcgatcacccggtagctgccggtattgcgcccgtagaaggtttcaatgccgatgatcgcaacgatgacctgggccggtacgccgtactcttgctcggcgcgggccagcactgcctcatgctggcgccagaagtccacaccacgggccacgcgggcgtcggtgaggaacatcgggcgatattccttccactgcttcacacgctcagcggggcgcgaaatggcgtcgaggatcgcctgctttttctgggcttcgcggaacacacccatcagctgttcaccggcgaaaccatagtcgcgggtcatctcaccgacaaactcggcgacctggggtgaaccatcgtagtcaccggcctgcgcctcttgcgttgcgcccagcagcccaatcaggcccatccaggacgcgtgccgagtcgcccagccgcgcattacttgcattgacatcttcaccttattcaaacctgtgcgatccatttgcgatgcgtatgaatcgacatcaaaaccccaaacgctgacagcaatgtcaccagcgaagttccgccgtagctaatgaatggcaacggcaccccaaccaccggcaacaggccactgaccataccgatgttgacgaaaacgtaaacaaaaaaagtcatggtcagggcgccggcgagcaatttgccgaacagcgtctgcgcctgcgcggtgatcaccaggccgcgaccaatcaacagcagatagatcagcaacagcgcgcaaatgcctaccaggccgaactcttcgcccatcaccgcaataatgaagtcggtgtggctctcgggcaaaaagtccaggtgcgactgggtacccagtaaccagcccttaccaaatacgccgccggaaccgatggcggccttcgactggatgatgttccagccggtgcccaacggatcgctttccgggtcgaggaacgtgagaattcgctgcttctggtagtcgtgcataaagaagaaccacatggccacggccaccggcaccgcggcagcgagcacgctgaggatccagcgccagcgcaggccgcccatgaacagcacgaacgcaccaccggccaggatcagcagcgaggtgcccaggtccggctggcgcacgatcaggatgaacggcacgccaatcaggatcaggctgatccccacgtgcttgagttgcggcggcaaggtgcgcttggacaggtaccaggcgatggtcgccggcatcaggatcttcatgaattccgacggctggaagcgaatcacccccggaatgttgatccagcgggtcgcgcccatggcgttgtggcccatcacgtccaccaccaccagcagcaacaccccggcgacgtagcccaacggcacccagcgcgccatgaaacgcggctccagttgggcgatcaccaccatcgacaacaagcccaggccaaacgaagacgcctgcttgatcagcaggtcccagttcttgccgctggccgagtacaggacgaacaggctaccggccgccagggtcagcagcaggatcagcaacgggccgtcaatgtgcatgcgttgcagcaacgtcgcgcggcgacgcatcacatcctcactggagaggatgcggtcaaaattactcttcacgggccgtaacctcggtgcttgaagggggcccgccgtattcgggcttgagcctgccgtcgtcggccaacagccaggcgtccattacttggcgcaccacgggcgccgcgacgccggagccggactcgccgttctcgaccatcaccgccaccacgatcttcgggtcgtccgccggggcaaagccgacaaacaaggcgtggtcgcggtggcgctcctggaccttggagcggtcatatttttcgccctgcttgatcgccaccacctgggcggtaccgctcttgccggcaatgcggtactgcgcgccgatggccgccttgcgcgcggtgccgcgtgcgccgtgcatcacttgctgcatgccgtggttgaccttggtccagtcggacgggtcgcgcagtacgatgtccgggatcgggttttcatccagaggcttctcgccctcgatggtcttggccaggtgtggacggttccagatgcctttgttggcgaccaacgccgtggcctgcgccagttgcaacggcgtggcctgcatgtagccctggccgataccgaggatcagggtttcgcctgggaaccacgcctggcggcgggtcgcgcgcttccactcccgcgacggcatcaggccgggggactcttcgaacatgtccagcgagaccttctggccaaggccgaacttgcccatgtaagcggacaggcgatcgatcccgagcttgtgggccaggtcgtaaaaataagtgtcgttggagcgcatgatcgcggtgtccaggtcgacatagccgtcaccggtgcggttccagttacggtatttgtgatcgtagttgggcagcatgtagtagcccgggtcgaacacgcggctggaggccgtgaccacacctgcgtccagtccggcaatcgccaccgccggcttgatggtcgagcccggcggatacaggccgcgcaacacgcggttgaacagcggccgatcgatggaatcacgcaactcggcgtaggccttgaagctgatcccggtcacaaacagattggggtcgaaactcggctggctgaccatcgccaggacttcgccggtagtcgggtccagggcaaccaccgcgccgcgccgcccgcccagggccatctccgccgcttcctgcagcttgatgtccaggctcagcacgatgtccttgcccggcaccgggtcggtacgcttgagcacccgcagcacgcggccacgggcgttggtctcgacttcctcgtaacccacctgaccgtgcaactcgggctcgtagaaacgctcgatgccggtcttgccgatatggtgggtgccgctgtaattcaccggatcgagggttttcagctctttctcgttgatccgccccatgtagccaacggagtgggcaaagtgtggcccttgcgggtaatgccgcaccaactgcgccaccacttccacacccggcagacgaaactggttcaccgcaatccgcgcgatctgctcttcggtcagctcgaacaggatcggcaccggctcgaaaggccggcgcccctgtttcatgcgtttctcgaagatcacccggtcttccggcgtcagttgcagtacctcgacaatcacatcgaggatctgctgccagtcgccggaacgctcgcgggtcatgctcaggctgaagctgggccggttgtccgccaccaccacgccattacggtcgaaaatcagcccacgggtcggcgggatcggctgcacatgcacccggttgttttccgatagcgtggagtgatagtcgtactggatcacctgcaggaaatacaggcgggcgatcagcacgcccaacaacgccaccaccatgattgcgccaaacaccacgcgtgcgcgtacgagacgtgcgtctttctcgtggtccttgatgcggatcggttgggtcatcgggaggggcgcagattatttgtggtaagggtgcccggacaggactgtccaggcgcgatacagctgttcaccgatcaggatccttaccaacgggtgcggcagcgtcaacgccgacagcgaccaacgctggtccgcccgcgcgcagacttccggcgccagcccttcggggccaccgaccatgaagttgaccgtacgcgagtccaggcgccagcgatccagttccaccgccagttgctcggtgctccagggcttgccgtgcacttcgagggtgacgatgcgctcgttggggccgaccttggccaacatggcttcgccttcctgacggataaagcgcgccacatcggcattcttgccccgggtattgagcggtatctctaccagttccagcgacagctcagcgggcagacgcttggcatactcgtgccagccttcttccacccacttgggcatacgtgaaccgacagcaatcagacgcaggcgcacagccgttccttattcctggtctttgttgagcttgtcgaagtgcgcgtggcccacttccgggctgtggtgcttgccatcggcggcacggctctgctcggcgcctttccacagacgctccaggtcgtagaactggcgggcgttggaagtcatcatgtgaacgatcacgtcgtccatgtccagcaacacccagtcgctgtcgcccttgccttcttcacccagcggcttcacgccctgggctttgacggcttcacggactttatcgagcatcgcgccgatctgacggttcgaggtaccggtggcgataatcatgaagtcggtgatgctttgcttgtcgcgcacgtccagcacctggatgtcctgggctttaacgtcctccagggcagccaccgcgacctttaccagctcttcgccagccagttccgggcctacgtgggcttcaaccggcagcggcgcgcttttgaaggtgcctttgcgcttaactttgcttacgtctttgttcgtcatataaaactcgttttgctcgtatgttcgggcgcttgctgcacgaattttcgtacgttcaagcgcgccttttcagttcgacgcacggtaaagcccgtgcgcatcgatgtaggccaggaccgcgtcaggcaccaggaaacgtaccgacttcccgctggccagcagttgacggatctgggtggcggacaccgcaagcggggtctgccagacgaatgcaatattcccgttcggcccggtcagggccaaggggtcacttaccgaccgcgcggccagcaggttgcgcaaggcatccggcggttcgctgtcggcatccgggcgttgcagaaccaggatgtggcaatgctggaggagttcctcccagcgatgccaagagggcaggccgcaaaaagcgtcccagcccagaagcaaaaacaactggtcatccgcggccaactcggcacgcatcagctccagggtgtcaacagtgtaggacggtttgtcgcgcttgagctcgcggtcgtccaccaccagcggcgctatgccttccaccgccaggcgcaccatctccaggcgttgctgcggcgacacctgcggcgtatcgcgatgaggcggccgcgcgttgggcatcacgcgcagctcgtccagcgcgagggcatccgcgacttccagggcactgcgcaaatggccgatgtgcacggggtcgaaggtaccgccgagcagcccgatgcgtttacccatcaagtgcgcacatgaccgtcgccgaacaccacgtacttctcgctggtcaggccttccagcccgaccgggccacgggcgtgaagcttgtcggtggaaatcccgatctccgcgcccaggccgtattcgaagccgtcggcaaaacgcgtcgaggcgttgatcatcaccgaagcggaatccacttcgttgaggaagcgccgcgcatcgctgaaatgctcggagacgatggcgtcggtgtgcttggagccgtaggtgttgatgtgctcgatggcttcgtcgaggtcatcgacgatcttgatcgacaggatcggcgcggtgtattcggtgtaccagtccagctcggtcgcctcgatcacgtccgcgcccagcagcgcacgggtgcgctcgcaaccgcgcagttcaacgcccttgtcgcggtagatggcagccagcggcggtagcacgcgctcggcaatgccgacgtgcaccagcagggtttccatggtgttgcatggggcgtagcggtgggtcttggcgttgtcggcgatgcggatcgccttgtcgatgtcggcggcgatgtcgatgtacacgtggcacacgccgtccaggtgcttgatcacaggcaccttggcatcgcggctgacgcgttcgatcaggctcttgccaccgcgcgggacgatcacgtcgacgaattccggcatggtgatcagcgcgcccacggcggcgcggtcggtggtttccaccacttgcaccacttcggcgggcaactcggccacggccaggccctgctggatgcaggccgcgatggcacggttggaattgatcgcctcggaaccgccgcgcaggatggtggcattgccggacttgaggcacaggcttgcggcgtcgatggtcacgttcggacgcgactcataaatgatgccgatcacgcccaggggcacgcgcatcttgccgacctggatgccggacggcaggtaacgcatgtcgcggatttcaccgatggggtcaggcagcttggccacctgacgcaggccttcgatcatgtcgtcgatacgtgtcggggtcagtgccaggcggtccagcagcgccggctccaggccattggcgcggccattggcaaggtccagttcgttggcggcgccgagctcggagcgcgaagcatccagagcatcggcggcggccagcagggcacggttcttctgcgcagtgctcgcacgggcgatcaaccgcgaggcctgacgggcagcgcgacccaggcgggtcatgtagtcaagaacggactcagtcatggtcagggagtcttggcagggaggaaagcggcagattatagctgtgacgccgcccgactgacagcggtgaggggcggatggtcgaaatgaactgtaaaaacctggggttcagcggtaattaaggcgggagttgttatgattccgtcacatttagccgtatttaccctgaccgccatgcccagttcatcaccccgactccccgccagcgccctgcccgactgcttcttcgaccgtgacgcgcaaatgcttgcgcaggaactgctcgggaaagtcatccgccaccgcgtcggcgaaacctggctttcggcgcgaattatcgaaaccgaagcctattacgtggcggaaaaaggcagtcacgcttcattgggctacacagaaaagcgtaaggctttgtttctggatggcgggcatatctacatgtactacgcccgcggtggcgattcgctgaacttcagcgcccatgggccaggcaatgccgtgttgatcaaatcggcctatccatgggtcgatgaattatccagcccggcgagcctggcgcagatgttgttgaacaacccgaaccccgacggcagcccccgcacctcacaaaaactgtgcgccggccagaccctgctgtgtaaggccctggggttgaaagtgccggcatgggatgccaagcgcttcgatcaggaacggctctacgtggaggatgtggggcagaccccggcccagatcatccagaccacccgcctgggaatccccagcggccgcgatgaatacctgatgtaccgcttcgtcgatgctggctacgcgccttattgcacgcggaacccgctgcgccggggccaggtcgaaggccgcgattattttttgatttgagcagggagtggattgtatgagccaatggctcgatagcattaccggctggttgaccctgaaccccgaatggctggcggtcgcggtgtttatcgtcgcctgtgtggagtgcctggctatcgccgggctgatcgtgccgggcacggtattgttgtttgccattgccgccctcgccggcagcggcgcgctgtcactgagcgaaaccctgttgctgggtttcctcggcggcttgctgggcgacggggtttcctactacctggggcgacatttccaccagaacatccggcgcttgcctggcttgcgtcatcaccctgaatggatgaacggcgccgaaacctacttccacaagtacggcattgccagcctgctggtcgggcgcttcatcggcccgctgcggcccatgctgccaatggtggtaggcatgtgcgacatgcccttcccgcgttttgcgatggtcagcatcgtggcggcggcgggctggtcggtggcgtatctgctgccaggctgggcaaccggcgccgcgttccgcctgccattgccggagggtttctggcctgaagcgggggtggtagccgcctgtatcgcggtggtggtgggcctgagcttgaacagcagcctgcgcggccatcggcgtgccaccctatggatcggttgcgccagcctgacgatgttgatcgccttgtttatcggctacccccatctcaacgattttgaccagggcctgagcgccctggtgcaggaacaccgcagcgcctggctggacgaagtgatggtgcgcatcacccaactgggcgagttcaagaagatgttcgtcgccagcgccgtgtttaccggcttgctgctagtggctcgacaatggcgccatgcgctgtttgtcggcgcgaccctcgccggtgcggcagtgatcaacaccgggaccaagctgtttttcgcccgtggccgcccggaaatcctcacagacccactgaccagtttcagcatgcccagcggccatgcatccggcgcgtttgcgtttttcctggccctggcggtcctggccgggcgcgggcaacccatccggctacgcctgacctggatgttgctgggctgcattcccgccgcgttcattgcgttgtcgcgggtctacctcggcgcgcattggccctcggacatcctggccggcacgctgctggcgatgacggtatgtgcgttcagcctgggggtcagccagtaccgcagcccgctaccggcgatgccgcaaaaagcctggtggctgttgctgccagcattggtggcggtgctcagcttcatcgccctcaccggcacgccccacgcgctgctgcgttacgcctattaagtgaacagctcgccctgcaactcatcgagcagcatctggatcgcatccaggcgctgctgcgggtcatcgagttgcaacagatcgatcttgtcggcctcggtgaagggcagcagatacgccagctgattgcccaaggcttgctgaccgtcggcgtgggcgtccatgtccagcgaggccaccatcgggtgctcggccaacgcctggagcaatgccagcaggtcggcgtcctcttcttccagcggttggtccggcagttcttcgagccactgcacatcggccaccagcagttggtctttctgcacgccggcgtcgcgcacccggaaccggcgaccaccttcgacacgaatccccagcaggccattgtcctgctgcttgaagtcgcgaatcagcgcttcacagccgatcagcgcgtaaccgtccggggccaggcccacttccttgccgtcgaggatgcacaccacgccgaagctttcgccctttttcatgcagcgggcgaccatatccagatagcgcgcctcgaacagttgcaggtcgagggtgcagcctgggaacagcacggtattgagcgggaacagcgccagactcataaaggtttccttaaccctggtttaaacgatcaccgacacagccagcggcaggaacactgccgtggccacgcccatcagactcatggccagcgccgcaaaggcgccgcactcttcgctttcctgcaacgccaccgaggtgccgaccgcgtgggcggtcatgcccagggccatgcctcgcgcctcagggctgtgcacgcccaggcgcgacaggtacgccgggccgatcatcgcgccgatcaccccggtgatcagtacaaacaccgccgccaatgccgccacaccaccgatctgctcggccaccagcatggcgatcggtgaggtcaccgacttgggcgccatggtcatcaacatcctatgttcggcgccaaaccaccagcccaacagtacacacaggccggtggccaacaccccgcctatcaccagcgtagtaaaaatcggccagaacaattggcgaatacgccgcaggttcaaatagagcggcaccgccagggccaccgtcgccgggcccaacaggatgcccatgatctcggtgctcttgcggtactcggcgtagctcaggccacagctgatcagcacgccgatcaccagcagcatggaaaccagcaccggttgcaggaaaatccagcgggttttctcgaaaccggccagtaccagttgataggcacccagggtgatgccaatgccgaacaacgggtgatggatcaccgccatccaggcgccctgccagtcgacggtcattggtccttctccttgcgcttgaccatctgctgcatcagtacgccgacaaagcccatggcaatcaccagcgataacaccagcgcgccgacgatggcccagaagtccgcagcgatgtccttggcgtacaccatcacgcccaccgccggcggcaccagcagcaacggcaggtaacgcaacaggctgctggcggccaggctcaatggctcgccgacctcgccgcgccagaccagaaaacccagcatcagcagcagcccgatgatcggccccggcagcaccggcaccagcaaatgattgatcgcggtgccgatcaattgaaacagcaccagccaggtcaggccccgtaacagcatccgttcttccccctcgaaactcgcccgcattataagcatgcccgccctatgcatcggcattcgccaaaagcatggtgggttgaccgggccgattggccatgatgatctacattggttctctgtaacccataaaaaacacgccctgcagggcggcaaaaatgatgaaccaaggagagacgcaatgccctatgtacccgtagcgcagctcaaagactatgtcggcaaggaactgggacgttccgaatggctcactatcgaccaggcacgcatcaacctgttcgccgaggcaacgggcgatcatcagttcatccacgtcgacccggtcaaggccgcgcaaaccccgttcggcagcaccatcgcccacggtttcctgtcgctgtcgctgatgcccaagctgatggaagacattctgatcatgcccgaaggcctgaagatggcggtcaactatggcctcgacagcgtgcgcttcatccagccggtgaaggtcaattccaaggtgcgcctgaacgtgaccctgaccgatgtcaccgagaagaagccaggccagtggctgttcaaggccaccgccagcctggaaatcgaaggccaggaaaaaccggcttacattgccgagtcgttgtcactctgcttcgtataaggccgtgcctgtggtggggaaataaacctcaccacagggtatgtaaatttatgtatgaaactcgcagctgcggcatactcggcgctcaattatccggatcccgctatgcgcccactcgctcccctcgcccttgccctgttgctcaccgcttgcggagacggcgaatcgctgttgccgcccgatgcgcgcctgcccgatggcggccgctaccggggtgatgtggtcgatggcttgctgcagggccagggccgcgtggactaccccaatggcagttggtacgccggccagttcgacaagggccagtggcacggccagggcgaatggcatggcagcaacggcgaagtctataaaggccagttccagcaaggcctgttcgatggccagggcagcctgaccacggcgggcagccactatgtgggcggcttcaagaatggtcgacgcaacggcgaaggcaccctcaaagaggggcagatgacctaccgcggcgaattcaagaacgaccagtattccggcctcggtcgcctggagctggcggacggcagccagtaccagggccagttcgcccacggcaaaccgaatggcgaaggccagcgcaacgacgacagcggcaaccagttcagcggccatttcgtcgatggccaattggaaggcaacggcaccttcaacagcgccgatggcgacatctatgtcggccagttcaagcagaaccaactcaacggcaagggccgctacgagaacgccgacggcgatgtgtggatcggccagttcaaggaaggcgcgctcagcggcaagggcgagttgataggtgtggatggcagccactacgtcggccagttcgctgattggcgctttaccggcgaaggccgcctgaacctcaccgacggtagcttctatatcggcggtttcgacagcgacagctatcaaggcaaaggcaccctggtgctcaccgatggcaccgtgcaggccggcacctgggtcaatggcatgcgtgtacgtgatgccgacggcaaactgctgcccgacccattggaaatcggcgtgctggcccaaggccgcctgctggatgctgccctcgccgccgtgcccgcctccacccccgccgtggagctgtacaccctggctgtggctggcgacggtaaacaaagcgtgttcctgcgcgaagccgattacgtcagcaacatgctcgccacccgcttcggcgcacgcgggcagattcgcctggtcaaccaccgcgatcacatcaccgaccgccccctggccacccgcgaaagcttgcgtcgcgccgtgcaaaccctggccgagcgcaccggcccggaagacctggtgttcatctacatgaccagccacggcacccacgaacacgaactggtgctggaccaaccgcgcatggagctggccgacctgccagctgatgagctggcggccgtgctggcgccgctgaagaaccgcgacaagatcgtggtgatttcggcctgctactccggcggattcatcccggccctgaaggatgagcacacgctgatcatgaccgcctcccgggccgaccgcgtgtctttcggctgctccgaggaagccgacttcacctacttcggcgacgccctcttcgcccaagccctcaaccagaccgacgacttgcagcaagccttcaagctggcgcaactgcatgtggccgaacgcgaacaggcggacaacttcgaagcctccgaaccgcagatctgggcccccaagggtgtgatcgcccattggcaattattacgcaaacagcaggcacgaaaggcgctggaaagcgtctcaatgaatagcaaggaagccaaaggcaactaagctgtaacgtgtaacaagggggaaacaccatgtacctgacgcctcagcatatcttgctcgccggagccaccggccttaccggcgaacacctgctcgaccgcctgctcaacgaacccaccgtgacccgcgtgctcgcacccagccgcaagccgctggccgaacacccgcatttggaaaacccggtgggcgacccagcggtgttcttgccgcaactgagcggccgggtggatatcgccttctgctgcctgggcaccaccatcaaacaagccggttccgaagccgcctttcgcgcggttgacctggacatggtcgtggccttcgccaagcgcgcgcgggaaatgggcgcacggcacctgatcgtgatcagcgcaatcggcgccgacccgaaatcctcggtgttctacaaccgggtcaagggggaaatggaacaagccttgagggcgcaggactggccacaactgactatcgtgcggccatcgttgttgctgggagaacgcttggaaccgcgcctggcggagcaactggcagggccgctgtcgcggttgatcccgggcaaataccgcggcattgaagtgtgcgaactggcccgcgccatgtggcgcctggcgctggaagaacaggatggggtgcgggtggtggagtcggacgagttgcgcaagctaggcaagtagttttgtggtgaacagaagggcgtcatcgcaggcaagccagctcccacatttggaatgcgttccctgtgggagccgggcttgcccgcgatgaggccagcacagccacttgtcatttaaagaccacccgtagcgttgaagccaacgccaagtaccgtcaacaccgacagcggcaacaacaaagtatcgagcaccgcactcgccggcagatccaccccaggataactcggcgcctcggcaccaaacctgtccttggcgcagcagccgccattcattgcatacaaatccaaccgcgtgccggcatacaccaccggcgcacccggttgcgccgcgtccaacgtacgcgcggtggcgcagcccgtcagttgcagcgccagcaggaccaacagcgccttattcatcgctgctcaaatggtgctcgccccaacgtggcagcatgtcctggggaatgttcaacaggttgagaatgcgtgccaccacaaagtcgaccaggtcatcgatggtctgcggctggtgatagaaacccggcgaggccggcagaatggtcacgcccatgttcgacaacttgagcatgtgttccaggtgaatactggagtaaggcgcctcacggggcaccagaatcaactggcggcgctctttcaaggtcacgtccgccgcccgttcgatcaggttgttgcaggcccccgtggcaatcgccgacaaggtgcccgtggaacacggcaccaccaccatcgccgctggcgcgccggagccggacgccaccggcgacatccagtcctctttgccgtagaccttgatctgccccgccgccgcaccggtgtactcggtgaggaacgcctgcatggtctgcaccttgggtggcagcgccacgtcggtctcggtggccatcaccaactgcgcggccttggagatcaggaagtgcacctcgcggtcttcacgtaccagacagtccaacaggcgcaagccatagggcgcgccagatgcgccggtcatcgccagggtgacgcgctccggcccgctcatttcagcgcctcggccagcttgccatgcaggccgccaaagccgccgttgctcatgaccaccacatgggtgcccggcttcgcttgatgcttgacgtgttcaatgatgccttcgatggagtcgcagacgatggacggcaccgtgcacagggctgcaattgccggcaggtcccagccgaggttggccggtgcgtaccagaccacctggtcggcgtcgttgacgctttccggcaggccgtcgcggtgtgcaccaagcttcatcgagttggagcgcggctcgacaatcgcaatgatcggcgcatcgccgacgcgcttgcgcaggccatccagggtggtggcaatcgccgtagggtggtgggcaaagtcgtcgtagatggtaatcccattcacatcggcgactttttccatacgccgcttcacactcttgaacgcactcaatgcggcaatgcccatggacggcaccacgcctacatgccgcgcagccgccagggtcaccaaggcgttggcagcgttatgctggccggtcatgtcccactcgacgatgccctgggcttcaccttcgaacagcacttcaaagcgcgaaccatcttcactgagtaacttgacctgccactgcccgcccgcgccggtggtttgtaccggggtccagcaacccatctcgatcacgcgctgcaaggccggctcggtggtggggtggatcaccaggccttcgctgggaatggtccgcaccaagtggtggaactggcgctcgatggccgccaggtcagggaagatgtcggcgtgatcgaactcgaggttgttcaagatcgcggtgcgcgggcggtagtgaacgaacttggagcgtttgtcgaagaaggcgctgtcgtattcatccgcctcgatcacgaagaacggcgtgtcgcccaggcgggccgacaccgagaagttctgcggcacgccgccgatcaggaaacccgggctcatgcccgcgtgctccagcacccaggccagcatgctactggtggtggtcttgccgtgggtgccggcgaccgccaatacccaacggccttgcaatacatggtcggccagccactgcgggccagacacataaggcaaacctttattaaggacgtattcgaccgccgggttgccacgggacatggcattgccgatcaccacgaggtccgggaccgggtcgaattgcgccgtgtcgtagccttgggtcagctcgataccctgggcctcgagttgcgtactcatgggcggatagacgttggcgtcggagccggtgacgtgatggcccagttctttggccagaaccgccatcgagcccatgaatgtgccgcaaataccgagaatatgaatgtgcatagtcgacctcgtaaaacatcgaggcaggttagcgcagggacggggaaatcgcactctttaggtgagccgcccacgctatgcggcggcttgcctatgccgtgtcgacacctgcgtcagcgcgtcacgtatggcagctattttttctcaattgtgttcagtcgatccgcaacgtccccgttgccttgactcacggagtcttcgtgtttgtacggtttgaagaaaacctcataagcctgtgcaagatcaatggtgagttcctcaagcaactccacgaaagcctccaactgatcgacggcctgcagcggttcgctggaccatttcgggatgtccaccacaacacccggcatcaattgcaaaaacaacttacccaactcactggcgccctgcgttgcagcgtcgacgcgagctcgaagggcagggtcaacgggttcaactgccgggcccaggtctgcaactctacgtcgccggggttaataccgccgtcaggagcagcaggacgctcatagtggttttgaagagctttttgcacctaaatgacagctgccacaatgccagcatcggtcaccgcttccattgcccagcgcttgacctgaccgacaaaagcgcaagcagaggactggacaaagtccttcaatggcgcaccgtatggcgtttgggtcgcagggtcgaaggcataccattttccgttgcgctccacggcaacgacgggaaccgcatcgctattagcgcccaacggcctgtagaggccttggaccccgccttttaaccccggaataaaaaagccaaacacatccagcactaaattgaaaaagccttcagcgggcctgcccttaataaaactttcaaccgcactgtagaaaggaatcaggcttaaaaagaacgccttgacggcctgtgagcgcgcgctttcccgctcttgctctgtgctgccattggccgttgctttcgcctcatccaaacctcgcgtgaaataagcaccgacagcgactgacagttcatcggttttagacgagaaaaaagtcgtcggcggggcgagatgctctccgggtataccggcctccaacgatttggaggtatagatacgataggcggaaaagtccaccgggtcgtttttcggcgatgtactaccgactgcctgccacaggatagtgaccggtggtgctttaccgcccggcgaatcaggcagcgacatggagaagtacaaacgagagcctggaaactgcaggccgggcctggaagggtcggcatccttgatgattcggccctgcgctggtgaatacagataatgacaaaccttcccatcacgttcagccctgataagtaccgcgccgctgcctatatacgcttgaattttatgatcggcgctgacagggccctgattggcactgggcgtctggagagagaatgtcgtgaccttgccgtattcaatcagccgccgatcttcgagcgggagcaatgagagttgatacttaaactgcgcggcaaaaccgtccttgagcccttggatgtatttgtcgaagctttcatcaaactgctgcttgatgtttggcaacttcggaaaacccaaattcactttctcggtattgaagtcagggtggctggatatccagaagtgcttatccagatcacctgacatgtaagtatccagcagcgaataggcttttcggccgggcgaccccggcggaacattcgctagcagcttctgctcaaaaaaagcttcattttcgacgccatacacgcgccgcagctcaacgagcgccaactctcgccgggttggcatcgacgtggacagcgcatcaacggaatcagccaaggttttatactgtgcttgcatggccttcaatgcgctttcgacttcctcgggggtgtacgcatcatcgcttttttcaacaataatgccgttggcaatgccccagtcgataacggccgtcatctgagcgagttgttgctgacgcttttcaagctccgaaacaggcgctttctcatcgagttccatgatctgcgcataggttttcgcatgcgttgatcccgggtgactcgcctcttggcgagccaccgctgcactgaaggaggcccattggtgggaaccatacaccagcgccgagggcagatcgtttacccgaaactcgggggcagacaccgacaacagttgaaaggcgatgattttggcattggcttcgccgaaccgggtggccagacgctcttcaaaacccgtgacaatttgcgcagcgctgaagccccaattacctggctgacgcaacgagtaccctgccagattattacgctccaggcctcctgccgaatccacatccaacaatagcgcgctaagcagtacttcctgcaggctggtagccgtggatactgcgtcgatgctgtcctggagcaacctggccaacgccatgccttctggagaaccgagaatggctttaaggatttttcaggttcccccttaccagaccgtaaaggttcaggaagggtaagccgcaagaattcgattaggctcggcataccgctggcttcatcagttttcgctttcggttgagcggctttccaagtggcaactacctggcgtaatttggcttgggcgtcagccgccaaagggacttctttagtgagtagcccgccataatcagccgtttgtggggactcggcactgcgtcgatatcgtgaggaggggggaaagttatggatttatctggaggagttgcaccgttaaatttgttatctatcggcgaatcggtttgaggataaagcgatatagaacgtgatgaatccagatagttggaaatcatggcgacattctcgaaagctattgcgcgcgacggggcaatctttcataaaagcctgtcacagagactccattcagcgccaggcttactaccaataaccgtctactcaaccttccctttcgacgttgtaaaatcaacattcactgcaaaagccaacaacgatattttgcgcatacccgctcattctttactcgcgcgcttttccattttcagcaagataccagcctgtgccttactcaccctggctattcgttcttcgagtgtattcatgcgactttccagtccgtcaaccccacaggcagcgggttcagcagccagataaggtttgaagaaaacttcatattgatcggcaacgtccttcgtatgttgttcagcgaagtccaacaggttctcaagttggctcatgcgctccagcgggtctttcgaccagttttgatccggcaaaaaacccgtttcggtatccccaaacttgagcaccatcgactgattggccaccgtgaacgcaagcacctgagcctcattcattctcgaatagagcttattgaggtcagtggtcactggcgcctctggacgctcgaccacagacttaccgctgggcgtcggcggaatcatgggttgaggcagatacgacgccttgatttgttcagaagcggcggtagacccggcatatgccccaatgttaattggcgcggacactatccctgttatcccggcactgatcgccgcatcgcgcgcgacatgcgccacagatggcgacgatggaatcacaccagacttgaccattttttcggcattcatcatccgggtcgtggcttccgcaatcgtcattttaggcgtagcagcgggcgcagggactttgttcttccaatcgaggatcttttggttgattttgggcggaagcagttgcacatgaggctcgttattgcccttgacggcgctggactgatcccttgctaccttgccgttcttatcgagcagccttccagtgcgatcaatcagaaagccttctcgattgacgcgctttccatccctatccaccaagtgaccctcagcgctgaccaagcgacccgagtgatcgatcaagcggccctgggggtcgacgagctgatttttctcattgacaagcttgccttgggcattgatcaaatgccccttttcattgaccaggcggcccttgttatcgaccgcttgaccgttattattaacccgttgcccatgttcattgatccgctggttattcgaattaatcagatggccttgtttattaatcgcctgccctttgtcattgagcaactgaccttgcttattgaccagccgcccttccttattataataactgcctgaaggcgcgtaatgcggaaccactttagacggccccggcagacgtttagatacgttaaccgcgggtggtttgattgtcggcatatagccacctcatcatgaacggacattaaatccaatagcgaaaccttatggcttctgttcattacgtggtcaccggtaaaaaatagttccttccggcctgcacccacactgcctattagataaagcgccccacccgagcctaaagaccgccataaaaacttcagagcacgctcacattaactagataccaccgcacgccgttgaattttatatttgcgcaacttcctataaagagtattacgacttattcccagcgcttgcgccgtgcacgtcatatgccagtgctgttgctccaatgccgccagcaacgtctggcgctcggcattatcgaggagtggctcgttggtgtgttgaacaggggtgtattgcaccatatcaggcagatccaacaaccctatccacccgtcttcgctgagtgccaccagtgtgcgcaataccgtgcgcaactgacggacattgcccggccaggcgaaggccagcaatgcctcgcgcgctgcgggctccacactgaccgattgctcaccggcctcctccctcagcaggaagtccagcagttgcgacttgtcgctgcgttcacgtaacgccggcaagccaatttccaggccgttaagtcggtaatacaggtcttcgcggaagctgccagcccgcacgcgctcacacaagtttcggtgcgtcgcgctgataatccggacatccacggcttgaggctcgccgccgatggggaccactaggcgatcctccagtacccttaaaagacgggtctgcaaagccagtggcatatcaccgatttcgtcaaggaagagtgtgccaccgtcggcctgttggagcttgccgcgcatgccatccttgagggcaccggtgaaactgcccccacgatagccgaataactcgctttcaatcaggctttccggaatggccgcgcaattgagcgctacaaacgctttaccggcgcgctgactggcgtggtgcacagctttggcgaaggcttctttaccggagccggtctcgccattgatgagcagtggcacatcacgctcaaatacccgcagcgctttgcgaaaatcattttgcatcgccgaatcgcccaggcaaatgctgggcagccgtgaaggctcaggctgggcgatgggggctgacgcgctgcgcgcttgcccacgcaaagcggcgaacagatgccggccatcccgcgtgcgcaagggccaactggccgtggcattcgcactggcgcggccgagcaattgatccagggagcaatcgaaaaatgcctctactggctgccccaacaacccgtcacgccgttgccccaacaagttcaacgcactctggttgaccgcacagatgcgcccttccccatcaaacgccagcaacccttcgctgaacaaccccaccgactccgcctgcagatgaaaacgcagcagccaatggttttcgaaatgacgcaggaagtaacaactctcgatcatcttcgccgacagattgaccagcgccatagtgtggaactggctctgacgcgataccgcttcccgtgcggatgacacatccagcacagccagcagatcgccatggggatcgaacaccgggctcgccgaacaggtcagcccggtatgccggccacggaagtgttcgtcacgatgaatggtcagggattggcgctccaccaggcaggtgccgatgccattggtgccttcgcacgcttcactccaatcggcaccgagccacagcccggcgcgttcgaagatcttgcgctctgatggcgcggtgacacagttgaggatcacgcctcgcgcatcggtcaacagcaccgcatgcccggcgccggacagctgctggtgcaggctgttcatctcactgccggcgatgtgcagcacctgttgcagccgctcgcggctttccagcaaacggccgtgttcaagcacggtgggggcgatggtttgcgcagggtcgaggtggtagtcctccaggcagcgcagccaggagcgggcgatggagggatcgctggacgggtcgcggccatgcgccacggtgagcacttgctgggcatggcgactgaaatgatcgttgtgcatttcttattattctccctgcgtgagaacccccagcatcccccagccatccaggcaatgcaatcccgggccgacccgccggtcacaggctgtaccgtttatggcacaaactgtcactcgggctgtatcgaccctgccacagcaacgccttgcaacaatgcccaaccccttgatttagctggctcacacagcagtggcccaacctttgctctacgcttatcaagcgctcgctgcgctgcgctcccaataaacataaaagccaggagatacccaccatgcgttacgcacaccccggtactgaaggcgccatcgtttcgttcaaggccaagtacggcaactacatcggtggcgagttcgttgcgccggtcgatggcaactatttcaccaacacttcgccggtcaacggcaagccaatcgccgaattcccgcgctctacggccaaagacatcgacaaagccctggacgccgcccacgccgccgccgacgcctggggcaagacctcggcccaggaccgttcgctggtcctgttaaaaatcgccgaccgcatcgaacagaacctcgaactgctggccatcaccgaaacctgggacaacggcaaggccgtgcgtgaaaccctcaacgccgacatcccgctggccgccgaccacttccgctacttcgccggctgcatccgcgcccaggaaggcaccagcgccgaaatcaacgaacacaccgcgtcctatcacttccatgaaccgctgggcgtggttggccagatcatcccgtggaacttcccgatcctgatggctgcgtggaaactcgcgccggccctggccgccggtaactgcgtggtgctcaaacccgccgagcaaaccccgctgggcatcaccgtgctgctggaggtgatcggtgacctgctgccacctggcgtgttgaacgtggttcaaggtttcggcaaagaagccggcgaagccctggccaccagcaagcgcatcgccaagattgccttcaccggctccacgcccgtgggcgcgcacatcatgcatgcggcggccgagaacatcattccgtccacggttgagctgggcggcaagtcgccgaacatcttcttcgccgacatcatgaaagccgaaccgtcctttattgaaaaggccgccgaaggcctggtgctggcgttcttcaaccagggcgaagtgtgcacctgcccttcccgcgcgctggtggaagagtcgatctacgacgacttcatgaaagtagtgatgaagaaaatcgagtcgatcaaacgcggcgacccgctggacaccgacaccatggtcggcgcccaggcgtccgagcagcagttcgacaagatcctgtcctatctggaaatcgccaagggcgaaggcgcacaactgctcaccggcggcaaggtcgagaagctgaccggcgacatggccggcggctattacatccagccgaccctgctcaagggcaccaacgaaatgcgcgtgttccaggaagaaatcttcggcccggtggtgagcatcaccaccttcaaggacgaagccgaagccctggcgattgccaacgacaccgagttcggcctcggcgccggtgtgtggacccgcgacatcaaccgcgcctaccgcatgggccgcgcgatcaaggcgggccgtgtgtggaccaactgctaccacctgtatccggcccatgccgcgttcggtggctacaagaagtccggcgttgggcgtgagacgcacaagatgatgttggatcactaccagcagaccaagaacttgctggtgagttacgacatcaatcctcttgggttcttctaactgacaacccgctctcacagttgaaatgcaattaaacatgtgggagcggacttgctcgctcccacatttaaatcttcataagtacttgcgaagtgcattcggcacgaagaggccgagttaaaacaataacaacggaaggtacttttcccatgtctagcgaacctacaagttcttctgtcgacttcgaaaaagtcgactcccaatacttccaacaacgcgaactgaaaaaaggcgccgccggctgggtgctgctggtaggccttggcgttgcctacgtgatttccggcgactacgccggctggaacttcggcctggcccagggtggctggggcggtatgttcctggccacattactgatggccaccatgtacctgtgcatgtgcttttctttggccgagctgtcttccatgatccccaccgccggtggtggctacggcttcgcccgcagtgcattcgggccgtggggtgggttcctcaccggcaccgcgatcctgatcgaatacgccatcgcccccgccgccatcgcggtgtttatcggcgcgtattgcgagtcgctgttcggcattggcggctggatgatttacctggcgttctacatcatctttatcggcatccacatctttggtgtcggtgaagccttgaagttgatgtttgtgattaccgccgtggccgcgattgccttgggtgtattcctggtgtcgatggtgccgcacttcagcatcgccaacctgctggacatcccggtgaccgaggccaagggcgccagtacgttcctgccgttcggctatgtgggtgtgtgggcggcaatcccctatgccatctggtttttcctggccgtcgagggtgtgccgctggccgccgaagaaaccaagaacccgaaacgcgacctgccacgcggcctgattggcgccattgtggtgctgaccagttttgccttgctgatcctggtgatcgcaccgggcggtgccggcacctacgcgttgatcaaatccggcaacccgttggttgaagcgctggcgttgtcctacggtggttcgacctggatgggcagcttcgtcaacctggtgggcctggctgggctgatcgcgagctttttctcgattatctacgcttattcgcggcagatcttcgcgctatcccgagccggctacctgccacgcaaactgtcgcaaaccaacaaaagcaaggcgccagtactggccctggtcatccccggcatcatcggctttggcctgtcgctgaccggccagggtgacctgctgatcctggtggcagtgttcggtgcaaccatttcctacgtgctgatgatggccgcgcacatcaccctgcgcatccgccgccccaaaatggaccgcccgtaccgcacgccgggcggcatctttacctcgggtgttgcactcgtgctggcctgcgtggccgtggtggcgggctttctggtggatccacgggtggtgattggcgcagcgatcatctatggagtattaattgcttactttgctttctacagccggcatcacttggtagcgggcacgcccgaagaggaattcgcggcgatccaggccgcagaggccgccttgcactgatagccgtaaacctcgacgcaggcacgtgcctgcgtcgccaaggagacactgtatggcaagtttttcccacgcggtgggtgcacagacctaccgcttcgacagcctcaaggacgtgatggccaaggccagccccgcacgctccggggactttctcgctggcgtcgccgcacagaacgacggtgagcgggtggccgcgcagatggcgttggcgaatatcccgctgaaacacttcctcgaagaagtgctgattccctacgaaagcgatgaagtcacccggctgatcatcgacacccacgataaacaggcgtttaccgccgtcagccacctgaccgtcggcggcctgcgcgactggctgctcagcgacgcagccgatgaacattccctacgcgccttagcgccagggctgacaccggaaatggccgctgccgtatcgaagatcatgcgcgtgcaggacctggtactggtcgcgcagaagatccgcgtggtcacgcagtttcgcggcaccatgggcctgcgcgggcgcttatccacgcggctgcagcccaaccaccctacggacgaaccggccggcatcgccgcgagcattctcgatggcctgctgtacggcaacggcgacgccatgatcggcatcaacccagccaccgacagcatcgcctcgatctgcgccatgctggagatgctcgacgcgatcatccaacgctatgaaatccccacccaggcctgcgtgctgacccacgtcaccacctccatcgaggcgatcaaccgtggcgtgccgctggacctggtgttccagtcgattgccggcaccgaggccgccaacgccagcttcggtatcagcctgagcgtgctgcaggaaggttacgaagcgggcctgagcctcaatcgcggcaccttgggccagaacctgatgtacttcgaaaccggccagggcagcgccttgtcggccaacgcgcactttggcgtcgaccagcaaacctgcgaaacccgggcctacgccgtggcccgacatttcaaaccgtttttggtgaataccgttgtaggttttatcggccccgaatacctgtacaacggcaagcagatcatccgcgccggcctcgaagaccacttctgcggcaagctgctcggcgtgccgatgggctgtgacatctgctacaccaaccacgccgaagccgaccaggacgacatggacaccctgctgaccctgctgggcgtggccgggatcaacttcatcatgggcatccccggctccgacgacatcatgctcaactaccagaccacttcgtttcacgacgccttgtacgcccgccagaccctgggtttgaaaccggcgccggagtttgagcagtggctggcgaaaatgggcatctttacgcaagccgacggcaaggtgcacttcggcaacagcctgccaccggcgtttcgccaagccttggcgcaattgggatgaaggagccgcctgtgcaactcgacctgcctgacaacccgtggctggaactgcgccgcctgacgccagcccgtatagctctgggccgcaccggcaccagcatccccactagcgcgcagctggatttccagtttgcccacgcccaggcacgggatgcggtgcatctgcccttcgaccatgcgggcctgcgcagtcagttggctgaacgcgggcgtgacagcctgttgctgcacagcgccgccactgaccgtcacctgtacctgcaacgcccggacctgggacggcgcctgggcgatgagtcggcccagctgctgcgcgatcatgcatcggccaatcccggcggcgtggacttggcggtggtggtagccgatggcctgtcggcactggcggtgcataaacacaccttgccgtttctgacgcgcctggaggaacagagcagcgcagacggttggtccttgtcgccggtcatcctggtggaacagggccgcgtagcggtggcggatgaagtgggccagttgctcggggccaagatgaccgtcatcctgatcggcgaacggccgggcctcagttcgccggacagcctgggcctgtatttcacctacaaccccaaggtcggcctcaccgacgcctatcgcaactgcatctccaatgtgcgcctggaaggcctgagctacggcatggcggcccaccgcctgctttacttgatgcgagaggcgtgtcgccggcagctgtcgggggtcaatctcaaggacgaggcgcaggtgcagaccatcgaatcggatgacccagacctgatgaaaggcaatttcctgctcagttcaccggatgactgatcgcggcacgattgcgctttttcgcgccattaggcagcatcgagtcacggccgcttgcgtggtcatcccccatttggaagttgaggcctggcatgcggattactcaagcgaccctggaacacctggacctgttgaccccgctgttcgtcaaataccgtgagttctacggggccttgcccttcccggattcgtcacgggcctttctggagaagcgcctgcgccgcaaggagtcggtgatctacctggccctggcggatgatgatgacaagaagctgctggggttttgccagctgtatccgagcttttcgtcgctgtcgctcaagcgggtgtggatcctcaatgacatctatgtggctgaagatgcacgccggcaactggtggcggacaacctgatgcgcacagcgaaaaagatggccaaggagacccacgcggtgcgactgcgggtgtcgactagcagcgacaacgaagtggcgcagaagacctatgagtccattgggtttcgcgaagacacggagttcaagaactacgtgttgccgatcagcgaagattgatcgcggtagaccaaacacctcaaatctactgtgggagggggcttgcccccgatagcagtgtgccagtcagccaatttgtaactggcattgcctcatcgggggcaagccccctcccacatttagccctgcagcgcttgcaagcccgagtaccacgacatccttcgctacaaaaccaacacgcttttcacctctcaatccgtataatgcggacctttcagggttgtaagaaatgcggcatacacttgtagccttattacccgagcttccgcacaggcctgctgagccgggccatccacacaggtgccatccatggatttcaacccgctcgaccttatcctgcatctcgacgtctacctcgacctgctggtaaccaattacggtccgtggatctacgccattctgttcctggtcatcttttgcgaaaccggcctggtggtcatgccattcctgccgggtgactcgttgctgttcatcgctggcgcagtcgctgcgggcggcggcatggacccggtgctgctggcgggcctgctgatgctggcggcgatcctcggcgacagcaccaactatgtgatcgggcgaacggccggggagcgcttgttcagcaacccgaattcgaagatcttccgccgcgactacctgcaaaagacccacgacttctacgacaagcacggcggcaaaaccgtaacattggcgcgcttcctgccgatcctgcgcaccttcgcgccgttcgtggccggcatcgcaaaaatgccctacccgcgcttcttcggcttcagcgtattcggcaccatcctctgggtcggcggcctggtgaccctgggctacttcttcggcaacgtgccgttcatcaagaaaaacctgtcgctgctggtggtgttcatcatcctgctgtcgctggtgccgatgatcattggtgtgttccgcagccggtttggccgcacctcctccgaagccaagccgcagtaacctgcgatgtggtccctcagcgcctggcgtcgccagcgcttgctggccaagcacccgattgccgatgacacctggcaacgggtgcgccaccacctgaccttcctcgacggcctcaccgccgagcaggaccagtggctgcgcgaagcctgcgtactgttcctcgccgaaaaacacctgaccgccctgcccggcgtcgaactgcaccaggaacaacgcctgctgctcgccgcccaggcgcaactgccgctgatgaacctgggcgacctcgactggtaccagggtttccacgaaatcgtgctgtaccccgacgacttcctcagcccccagcgccaccgcgacagcagcggcgtcgaacacgaatgggacggcgagcacagcggcgaagcctggcaacaaggcccagtgatcctggcctggcccggcgtgctggccagcggtcagtgggaaggctacaacctggtcatccacgaactggcccacaagctcgacatgctcaacggcgacgccaacggcctgccaccgctgcaccacgacatgcgcgtgcaggaatgggccagcgtgatgcagagcgcctacgacgacctcaatcgccaactcgatgccaacccggacgccgagaccgagatcgacccctacgccgccgaaaaccctgctgaattctttgccgtcaccagtgaatattttttcagcgccccggatttactggtcagccgttatccacaggtgtacgcccaactcagccgcttttatcgccaggatcccctggcccgcctcacccaactgcaagccagcgacccgcgctatcagccacagggcgaatgaccgtacgacgtctggcgcatggcatcggcgtcagaatgtgcctataatcgccgccacttttaggccaatccggccatgtttcatggccaattaacgggggcaacgcccaatgagctacagcaagattccggctggcaaagacctgccgaacgacatctacgtcgccatcgagattccggccaaccacgcgccgatcaaatacgaaatcgacaaagacagcgactgcctgttcgttgaccgtttcatggccaccccgatgttctacccggccaactacggtttcatccccaacaccctggctgacgatggtgaccccctcgacgtgctggtggtaaccccttacccggtgaccccaggctcggttatccgtgctcgcccggtcggcatcctgaacatgaccgacgacggcggcggcgacgccaaagtgatcgcggttccacacgacaagctgtcccagctctacgtggacgtgaaggaatacaccgacctgccgcccctgttgctggagcagatcaagcacttcttcgagaactacaaagatctcgaaaaaggcaaatgggtgaagatcgacggttggggcaacgcagacgccgcccgcgccgagatcctgaagtcggttgccgcctacaaaggctgatacccgctcctcattgcctcggcaattgaaaaagccccgatcattcggggctttttttgtgggaaaaattaaacagcaagttcaatactttataaacaacgtttaacttaaaacgaaatccgaagtatcaggctacaactaagcaaaaccctacaagcgcaactcaacgcatggtttatttgatctgtaattccggccagtaaactctgcgtttatgaatacatcaggtgatcgtttaaaagcgctactacgggaagttcatctttccgcctccgacttcgccaagaaccgcggtgtcacgccccagcacgtgaacaactggttcaagcgcggtgtacccatgggccgactcaacgagatcgcagaactgctgtgcatctccagccgttggctgcgcaccggcgaaggccccaaacacccaccggccaacttcctgctggaaggcccgagctcacgaaaaggactgcccaccacccgcgaagccagcggcaaatacctcacaggccccgcctgcctcccggaaaaaaccgacgtggagatcgacctccacccctcattcacctctaccgaatgcatccgcatcacccttcacaccctccaggccctcaacgtaaaacccgaccgcgccctgggcgcctacatggtcgacaacagcatgatcgacatcatccaacaaggcgccaccctcgccatcgaccgaggccgcacccaaatcatcgacggcgaaatctacgcggtagaacacgacggcatgctgcgcatcaaatacctctacaaccgacctgggggcggtttgcgcatgcgcagccacaatgccggcgagcacccagacgaatacctcacctacgagcagcgcttcgagcagaacttccagattgtgggttgggtgttctggtggtccaccctgaataaccgccgcccgcccgtgccgctggatgagcatttattgggctgggaaggctctaaatcggatccggaggtgggcaactgaggtgaatgtgggtatcatgcggcccacatttggcaggggggtggttttgcgctatccaccttgcctggcgaagcggaggagttcccgcggatgcccctactattcagccagacgagatgtgggctgagcgatttgaaggctggtgaggcttgtcaaaaacaagctgaagcagtccccgagaagccggccacaagccggctttttaatgtccgtaaatccccctagtgaattgtccaacaagctgttggacaattgaatgaccaaaagcgggcggctcacagcccctcattccggctatctcttccagatccagataacgagaatttgaggctgctacacagcccaacgcggggcaagcccgctcgccacaagacgctcaatcaagtatcaagtgcggcaaaaaccgactcgaatccttcgtgatcaaactattatcctcccgcaccccaatccccgccgcctggtccccgatcacccaagacccaatcaacgtatagctgtccccgaaccgtggcagcggtgcaaactcctgaagaataaacggcgcatccgtataagggccgtcctccttcacgatcaggccgtcagccgtttgcaattcaatattcgccccttcccgcgaaaaaaacggcttacgcacccagccctttggcacagctttacccggctcagtatccaggtgcgacgccagcaaattcggatgccctttgttgaactcccacaacaacggcaggatgcctttgttggaaagaatggccttccacgcaggctcgaaaaactgcgtgtcgcactgggcaatcgccgcaccaaagggctcgtgaaagatgaattcccaggcgtgtagtttgaacaggtggggaatccagcgatcttcgaggtcaacgaagcgaccttctgcggtcaggccgatgtcttcgatgtcgatgtggcgtgattcgataccgactttttctgcgacgaggcgcaggtagtcggtggtgcctttgtcttcgaccgagtctttcatggaggcgaagtagaagggctggctgacctgcagttgggcgaaggcctggtgcagtttggtgtcgatgctgttgaattggtcagcgtgcttgggcagcaggccgcgttcgatgcattgttccagccagccccattggaacgccgcggcttcgtagaggctggtgggggtgtcgtagttgagttcgagcagcttggcggggccggtgccgttgtaggagaagtccatgcgcccatagaggtgcgggtggccttcgagccatgaggtgcggatcatgtcgtagaacggcgcggggatgctcaggcggtcgagcagttcttcgctgtggaccacgcgagcgacgaggtccatgcacatgtcatggacctcggtggtcgggtcttcgaggtcgtgctcgatttgcttgagcgtgaactggtagtacgcgctttcgtcccagtagggttcgttgtcgatggtgtggaacagaaagccgaggctgtcggcggtctgtttccagtcatgacgttctgcgcagtggatcttcttcatggcccgtcttccttagctactcgacccgccgccgccccagccgctacgtgcgctggccttgctgccgaagccgccacgggaggtggccgacgccacggagctcgacttgctgggcgtgcgcagcgtgttggtgtaattgctgctgccgtagcgggcctggttggaacggccgaaggtggcgccattggagacgcgctggttgagcgtcgagttgccgtagttgccacgatcatcgcgatagcggtacaccggttcggagcggtagctgttgcgattgttgctcagcatgttgccgatcagcaggccggtcagcaggctgctggtggagaagcctgagccgccactgttcgcttgggagctggcttgagcgttggccgcgtcgacctgggattgtgtcacctggccttcggcggtcagttcgaaaccgcccagccgggggatgaacttgccggtggagtcctgctggcaccagtcggcgacaaagtcggcatcgcaatcggcctggctgtcgtacaccggtgcaatgcggcgatgctcggccatggcggtcatgtaggcgtccgagcagacgtccaccgggagtttttcgtcggcgcactgctggacggactggaagttgtacttcttctgcaggtcgtaggttttttccgtcgggccgcagccggaaatcgccatggcgaccgacgctgccagcgacagctggacgtacttgcttcgtttcatcgggagctccgtgcgcgatcagttctgggtaggcgtcatgcacgcggcattcaacatgccgacgctgatggccacggcggcgacgtagatgccggccgcaagctcgccgttcttgatgcgctgggacgtgcccttgagcaccaggctggtcagcaaaaacgccaacagctggacgacggcggcgatcactgcccacacgacaaagtcgagcacgctgatcgagtaggcaatcacgttgctggccggaatggcgaaaccgacgatggcaccgcccagggcgaccgccgcggagacgttacccgcacgaatcagttcgaattccttgtgcggggtgatgcgggtgtagatgaactggaacagcgcgaacagtacggcggccccgaggatatagatcacaaacccgagcacggcggctttgttcagggagatggagagagcttctagcatgaatggcttccttgtttagagcgcgttcaggtcggttgtgtacagcgaaatgcccagcgaggtgctcaggctgatggtgccttcagcgtcttcttcgacggaaaacagcaggaactcgcgtcgatcggtcaggccggtgtcacgggcatatagcatcgagcggtgctcgacgctgtaggaatcctcggggttgatcacgcgctcgctcatggccaccagttcggtctggccctcctcgctgccccatacgcgcgcgtattcgacgccgtcgtgggtgtaggtcggcaacccgatcaggctctgcggccccgccagccgacgcagttcggcttcactactgatggtgatgtaactgaggtagttaaacaggatcaccgactcgacctgcccggcgatgtcacccgtggtgtgcacctgcaaccagtagtcttcgtcgttcatgtagtagcgcgacagccaggtcgactgcccgaggtcgacggtgccgttgctccagatttcctgggagccggggataaccaccgaggtgtgcccatccagcagcaatttcagggtggtgtcgaacatcacgcctttgtccggtgccaggcccagcggcccagtggtcggcagggcttcggcggcggcgtggttcggttgtgggttcgcgttcggggcctcgagccccatcaactgtttaaaccatcccattggagatttccttgaggcgggtggaggcgatgtagaagagttcgccaccctcaacgcgcgtggcgctgggcgggttgatcgacggttgctgggcgcccttggcgcgataaccgataagggtggcgttgtgatgttctttcatccgggtgtacaggtcgccgaacgtggcttcaaaggcctcgggcaatttcatcaggtattgggtggcgccctgccccacgcacagcagctcattgatgaccaccgacgagcccgggtcctgggaggcacgcaccagcatctcgatggccatgcttgaggtgcattccagacgcggcgcgtaggagctggcgagtgcggcaatttcgctttcattgaagtgcgcgaccacatgcccgacagggttgagttgattcaccgccagcaccgtggccagggtcaggtcgtcagacggggttcgcaccagcacacgctcggcaccgggcacaccggcacgcagcaatagcgccgtggaagacaggctgtcaccgcggataaatgcggccttgcccggcatcgggttttcgtcgagggtgcaatcgcagatgacgatcaggttgtcgttcgaggtttcgtcctgcagcagcaactcgatgacccgctcactggacgcgccttcccagccaatcagcacggtatgcccgaccttgccggtgaaatcacctttgcccttcatgccttttctccatgcatcgatgacgctgctggtggttttgccgatggctgccgtcagcagcgcaatgccgccgagcatgatccaggcggccacgaaaacccgcccggcggaagtctgcggcgcaagatcgccatagccgacggtcagcgtcgtggtgagatagaagtaaacaaatgtggcgaaggcggtgaggtgctgttcgcccagcaccaccaggcccagataagccgtgctcaggtgtacgcccaaggcgatgaccaggcccgcccagccgaagcggtgaaacagggacgaggcgtacatgcgcaacaacagaaaaatcgacattcttgcccctgattccctgggtacttgtcatcgcctggaggcgcaagtgcgttcagccggcattaaacctgctgcgcggcgtagagagaagtaccttggctgcaataaatccggcgaatgcaccaaacagatgcccctcgaatgaaacaccctggcgaggcataaagccaaggaccagtccgccatacagtaccgccacgacagcggccgttatcaggttgctccagctccggtggaaccaggcgcgcgacaacaggtaggcccacaaaccgaagacccaaccactggcccccacgtgcacgccggcaaagccgaacagccagaccagcgagccgcccagcaggatgatgatcgcgctgacggtcacgaaccgattgagcccttcgataatgaccagggtgcccaggatcaaaaaagcaatcaggttcgcgctgaggtgcgcaaacgacccgtgcaaaaacggtgaggcgaggatgccgaacagcccctgcagcgttctcgggaccaggccgaatgccataaggctgtaaccggtcgcgacattgaccagttgcaacgcgaccatgaacagcgccaagcctgcgattgtcttgaaacccttcagggcatccatcctgacctcgacataataagaagggcagacactgcccttcctgcatcgccgttgcttactcggccgacttttgcttcagacgttccagaatcgcattggcactgccttcgttcggcgtgatgccggcttcacgcagcttgcgttccaggtcggtaccggtcgacgcttcggccagttcatcctgggcttgcagttcagcggcacgttgctgctgcttggcctgcagacgattcagcgtaccgacggcggtttccagcttgccgttggccccaccgctggcgatggacgcactgacctgggccttctgtacgctttcgcgcgccttgaccatgtccacttgctggcgcaggcttttgatgcggctttcagccttggtgatgtccttgcgcatgctgtccgcataggcgccgaactcggtggcctgcttgtgctcggcgtcccgctcgctggtcagggtcgagatggcttcggccacttccagggcgaggtcttcacgattggcctgcagggcagccatcgccttggattccaggtccttgatcttggcgtcgtactcgctgacacgatccgtggccagcttgtgcttggccatgatgctgaccagctcacgcttggcattggccagcgcggtgtctgcatcgcgaatttcctgatcgagaatgcgcagggcctgctggtcgacgattgattcgccgacttcgctggcaccgccacgcagcgcggtgaacagtttgctccagatggattgagtcattggatactcccggatacttaattgaagaaacgttcaaaggcttcgctggcgcgttgcacgttgtcgaccagggttttcacctcggtcacgatgttggtcaggctggagtcggagctcaatgcgccgaacatgttgtagaccacctgcccgttcggcatggactcgatgccgatggaggacagcgggaacatttcccggctgcgcagcaccgcatcattgaatttcgcgacatcgttgatggactcgacatcgaccagcacggtgtcgacgatgatctgctcacccaccaccgcgatgtaaatcggcaagccgccgaagtcgttcatctccagcttgatgctcgactcggagccttgaaccagagaaagcgtaatgtcgttggagaccacgtcgtccagggcctgaagcgccgtgaagaggcggtcgatattccagttgttacctgcgctcatgaaattctccgacatgaatgagccagccaggatcggctggcgaagctgtttctccatctgcttgagcaggcttcggttttcgggaagcacccaagtctcgtgtttcacatagccggcggccgccaggcccgcgcgcatctgcttcatgtaaaagctcgatggttttttcgcggacgacttcaagcgctctccctgaaggctggctgaatcggtatcgggcccttcagacgggctcgatggagagctgcttttcatggtgctgacctcgttgtgaaaaactcacgcgtgagaaaatctacaggctatttttgccatgctcaatagctcacgcgtgagatatttttccttacatgttcctgtcacgaaaaagacctgacttattgcccgactcagcattgtcctatccaggttgacggtattacctattccagccgatttatcccccgcagcccacccattaatctgtgcccatgttgaaagcaacgcccaaccaacctgaacaaaaaaggattcaaccatgagcactgcaacctacaaccgcctcaacaaagacgacgccattgttctgctggtcgaccaccagaccggcctgatttccctggtgcaggacttctcgcccaacgagttcaagaacaacgtgctcgccctggctgacctggccaagttcttcaacctgccgaccatcctcaccaccagcttcgaacaaggcccgaatggcccgctggtgccggaactgaaagagatgttcccggacgcgccgtacatcgcccgccctggccagatcaatgcgtgggacaacgaagacttcgtcaaggcaatcaaggccaccggccgcaagcaaatcatcattgctggcgtggtcaccgatgtgtgcgtagccttcccgaccttgtcggcgctggcggaagggtttgatgtgttcgtggtgaccgatgcgtcgggcacgttcaacaccacggtgcagcaggcggcgtggagccggatgacccaggcgggtgcgcagatgatgaactggttctcggtggcctgtgagctgcaccgcgactggcgcaacgatatcgaaggcctgggaaatctgttgtcccagcgcattcctaactatcgcaatttgatgaatgggtatgcggcgctgacggcccatcagaagtaactcaaccgaacgtcgccctaagcctgccctgaaaagcaggcttttgttgctgtgtgcaggccacagggcaattatcgccagttctacctaaagaccctgcaagggctgactcttaaaccggtgccccgaccaacagttgtccggctacacggtccagcactgcaaatgcctcttcacgcttttcaacagacattccagcaatattgcgtagcttccattgcaccgccggtagcttatcaataccgtccagggccagcagctcccaatcaggctttgcacgcttaagtgaaagcaaaaaagcagcatcttgcgcacaaaactgctgccgtatcgcctcaagcaacccatgccgggtactctccaactgttcaagcgtgacaggctcacgggtcatgccggcaaactccgcttggaatatgcccgcgagcggtttccaccgtggcgcaagcagctcgctcatcggcctccgatgactgatcaagtacaccagaaaaccctcgaagatttcccgcgtcagcccctcctcgcggagcatcagcatcacgtcaaaaagatcccggggatgctgtcgatccagcgcagcgcaaatcttgccaccatacaaatcgggcaacgagaccacagggatagaagcgaacccgaattgatcttcaaccaacgccacgacatcacgctcttgcggcgcatgaacagtgccccgcatcacaggcgaaacttcgatcttgatttgagcaaacgggctgcgtaccagcactcgcagttcatcgtctcgatttgcttggaccgtcgcaccgacgcgaggtaagccttgcgcaaccgcatccgcgatgcgttggagcgccagacggacatcgcctaatgcctgttggcgatcagaacttggcaggtacgccaggtctatgtccaccgacagacgagggagatcacgtatgaacagattgatggccgtcccccctttcagggcaaaacaccgctctgccgctacgtgagggatgacctggaccaacaatcgaacctgagcggcataacgagcatcaagcgccattggcaaaactctccggcacggtgattaggaactctttatcgagtcgaccaccccggatgagttggcgtttgcctttacctagatcgatgctggaaagatctattcgctcataccacacgtgtcgcgcgtttcgcgccagcaggaggaaaacacgtttgacgcgaatcgagttgcacgcttcaagcaacttctgcaggcgcctggggctcagtgagcccaaaccgctgaacacatcagcgacatgactgaagagcatctcgtcggcggcttgatgaataagctcaagtacggcgcgttccggggttgcgatttttaactcaaatcggctgtaagggacctgtaaaacttgtaacgccatatcttccatttccgcgaaaagtccaccgggatagaagttcacgtcgacgtcccaagggtacttgcggaaccagcccgcaagcacagcgcccggtgttccgaacagatcgacagcctgctttccaaaggcgaggtaatggctgtagccgagtaaactcaacgccgtcgcgccgcccggccaaatatgtaccgatgcattttgctgcaaagcgaataccccgccctgccaatccagatcatcgccgcagcgtttccacgcgccatggcccacccgctcgacccaaccactgcgctgatacttttggatcaggctggggccgacgccatggctatgcagccaggcttgcgtcgcaatggaacccggtggccaatcagccagcaggcggtttattttcatgataaataagcacctataaggtcatgtttttcataaatactaaaccatcctcgagatgatttctgcgataaaccatagataaacaatcgtctcctttgagttgacggtattacctattccagccgatttatcacccgcagcccacccattaatctgtgtccatgttgaacgcaacgcccaacccccccaaacaaaaaaggattcaaccatgagcactgcaacctacaaccgcttgaacaaagacgacgccgtagtcctgctggtcgaccaccagaccggcctgatttccctggtgcaggacttctcgcccaacgagttcaagaacaacgtgctcgccctggctgacctggccaagttcttcaacctgccgaccatcctcaccaccagcttcgaacaaggcccgaatggcccgctggtgccggaactgaaagagatgttcccggacgcgccgtacatcgcccgccctggccagatcaatgcgtgggacaacgaagacttcgttaaggcgatcaaagccaccggccgcaagcaaatcatcattgctggcgtggtcaccgatgtgtgcgtagccttcccgaccttgtcggcgctggcggaagggtttgaggtgtttgtggtgaccgatgcgtcgggcacgttcaacaccacggtgcaacaagcggcgtggagccggatgacgcaagccggagcacagatgatgaactggttctcggtggcctgtgagctgcaccgcgactggcgcaacgatatcgaaggcctgggaaatctgttgtcccagcgcattcctaactatcgcaacttgatgaatggttatgcggcgctgacggcccatcagaagtaaatcaactgaacgtcgccctaagcctgccctgaaaagcaggcttttgttgctgtgtgcagcacacgcttgactctcccctatacggcaacccctaccctgaaacgccctgttcaggacctcacccatgccaacgcgcatcctggttattctcggccatccatccgcaaacagcttttgctctgccctggccgacacctacacccactcggcaaaaaccgcaggccatgaagtacgcgtcctgcgcctgggcggcctggcttacgatcccgtcctgcgccatggctacaaccagttccaacccctggagcccgacctgctcagcgcccaatccgacatcctctgggccacccacctgacattcgttttcccaatctggtggggcagcatccccgccttgatgaagggctttatcgaccgcgttttcctacccggttttgccttcaagtaccaaaccggcaaggcgtttcccgacaaactcctgagtggccggaccgctcacctgttggtgaccctggacacgccgccgtggtattaccgctggttctaccgcatgcccggcatccaccagatacgcaagaccacgctgggattgtgtggggtcaagacaacccaaacattgctgttggggccggtgctgggatctactgccgcgcagcgggaccggtggctggaacaggccggcgctttaatcggaaaagggagttttcatgtacatcggcaaagccgcgcagttgtcgggcaccaccatcaaggcgattcgtcactatgaagcaatcgggctgctgccggcgccgcagcgtcagggccagtaccgggtttattcggcgcagagcgtcgagttgctgttgtttatcaagtgcgcacagcagttggggttcaagctcaaggagctgcaagaaattcttcgagaccacgctggcggtacattaccttgggatcgggcggatcaggccatcgctgacaaaaaacacgcgctggccatgcagattacgacgctgcaacagatgcaagcagggctgcttgagttcgaaggccagttaaaagatgcacatggccgctgctctcaactggtgaccgcgccgcgctaagtggacgatgagccgaatagaatgcacaatcggctcatccaatgagccgaataaatgtggtattcggctcactcatcaggtattcgcccatgaatcatcctttctggatctggcaacaggccggctggccgcacttccactggcaaccgggacgcctggccgtcgtgctgcgtgagtgcgggcacgcgcagggtcggctaatgggcatgctcggcaccgtcagccaggcggtcagtgcacagaatgagctggatgccttgctgcaaaacatcctgacttcttcggcaatcgagggagagcaactgagtgtcggctcggtgcgctcgtcactggcacgacgcatgggcctggaggcgatgaaagacggtcaggtcagccgtcgcagcgaggggctcgcagagctgatgatggatgccacgcaacaatttgcccaacccttcaccctcgctcgcctattgaattggcaccacttgctattccctgctcagcatgaaggctttgctgcgcgcgcgctgaacatcggggcgttgcgcggggatgagccgatgcaggtggtatcggggcgacttgatcgaccaacggttcatttcgaggcgccgccgcgcaaaggcctggaacacgcgctcggtgagtttctggaatggttcgaaaccagccgcaaccaaccggaactggacccactggtccgcgccggcgtggcacatttctggtttgtcaccctgcaccccttcgatgacggcaatggtcgtctgacgcgtgccatcaccgatttggcgctggcccaaggcgagcatcaagctatccgcttttacgccatgtcggccagcatcctcgaagaccgcgctggctattacagcgcgctggaatccagccagaaggccacgctggatatcaccgactggctggaatggttcctcaagaccctgctgcgcagcctgcagcaagccatggtgcgtattgaccgggtattggacaaaagccggttctggcagcagcaccgcgacctcgcgttgtctgccgaacagatcaaggtgctcaaccgcctgctcgatggcgatgaaaagggttttgagcacggtatcagcgcggcgcagtaccaagcagtggcaaaggtgtccaaggccacggcgacgcgtcatctagctgatttgctggaaaagaactgcctgatccgactccccggaggcggccgcagcacgcggtatcaagtcaatacagcggacaagtgatacccccgctcatttgcccagaatccccatgtctgctagtgtcccgccggtttaccgtctaccggaatagccgccatggcccgcaaaaaagttgcactcgatttcgaacaatccctcgccgacctgcaatccctggtcgagcggctggagaacggcgagttgtcgctggaagactcgctgacggcgtttgagcaaggcatcggcctgacccgtgactgccagagcgccctggcgcaggcggagcagaaggtgcaggtgttgctggaacgtgacggggagttggccgaagaacctttcgatgcggaacagcccgaatgatcgacgcgtatcaggccagtagccaagcccgggtgaatgcggcgttggaacccttgtttgttgcgccaagccccgaactcaagcgtctttatgaagccatgcgctacagcgtgatgaatggcggcaagcgcgtgcgtccgttgctggcctatgccgcctgcgaagccttgggcgcaagcgccgaacaggccaacggcgcggcctgtgcggtggagttgatccacgcctactccctggtgcatgacgatttgccggcgatggacgacgacgatctgcgtcgcggtcagcccaccacccacaaagccttcgatgaagcctgcgcgatcctcgccggtgacggcctgcaaagcctggcgttcagcgcactgctggacccggcattgagcagcgtgaatgccgagatccgtttgcgcatggtcaccgccctggccgtggcggcaggcccggccggcatggtcggcggccaggccatcgacctcggctcggtcggccagaagcttgatcaacaggcgctggaatacatgcaccgccacaagaccggtgccctgatcgaagccgccgtacacctgggagcacttgccagcgggcgggccgacgccgctcagttggccgcgctgaagacctacgcgcgggccatcggcctggccttccaagtgcaggacgacattctcgacgtcgaaagtgacaccgccaccctgggcaaacgccaaggcgccgatatcgctcgggacaaaccgacttatcctgcgctgctcgggctggaagccgccaaggcctatgccctggaactgcgcgaccaggccctggatgccctgcgacctttcgacgcggcggccgagccactgcgtgacttggcgcggtatatcgtcgaacgccggcactgataacggcggcctttagggccgcatatcggccaagttcggcgctctgcgtgggcagtttgcgatgcttgaggtaaactgccgcctcttctatacctataacgattcgcctgatgcccacgacgtttcaagagattccccgcaagcgcccgtccacgcccctgctcgaccgtgctgtcacgccggccggcctgcgtcgactcggtgaagccgagctggaaaccctggccgatgagttgcgcctggaattgctctacacggtcggccagaccggtgggcattttggtgctggcctgggcgtcatcgagctgaccatcgccctgcattacgtgttcgacaccccggacgaccggctggtgtgggacgtgggccatcaggcgtatccgcataaaatcctcacgggccgccgcgagcaaatgggcaccctgcgccagaaggacggcattgccgcttttccgcgccgcgccgagagcgagtacgacacctttggcgtcggccactccagcacctccatcagtgcagcgctgggcatggcgattgccgcccgcctgcaaggcagcgaccgcaaggcaattgccgtgatcggtgatggcgcgctgaccgccggcatggccttcgaagcgctgaaccatgcgcctgaagtggacgccaacatgctggtgatcctcaacgacaatgacatgtcgatctcgcgtaacgtcggcggcctgtcgaactacctggccaagatcctctccagccgcacctacgccagcatgcgtgaaggcagcaagaaggtgctctcgcgtctgcccggcgcgtgggaaattgcccggcgcaccgaagaatatgccaagggcatgctggtgcccggcacgctgttcgaagaactgggctggaactacatcggccccatcgacggccacgatctgccgaccctgatcgccacgctgcgcaacatgcgcgacctcaagggcccgcagttcctgcatatcgtcaccaagaaaggcaaaggcttcgccccggcggaagtcgacccgatcggctatcacgccatcaccaagctggaacccctggacgctcctgccgccgcgccgaaaaaggccagcgggccgaagtactccggtgtgttcggcgaatggctgtgcgacatggccgccgccgatccgcgcttggtgggcattaccccggcgatgaaggaaggctccgacctggtggcgttcagcgagcggttcccgctgcgctacttcgacgtggcgattgccgagcagcacgccgtgactttcgcggccggcatggcctgtgaaggcgccaagccggtggtggcgatttactccaccttcctgcagcgcggctacgaccagttggtgcatgacgtggcggtgcagaacctcgacgtgctgttcgccatcgaccgcgccggcctggtgggcgaagacggcccgacccacgccggcagctttgacctgtcgtacttgcgttgcatccccggcatgctggtgatgacgccgagtgatgaaaacgaactgcgcaagatgctcagcaccggccacctgtacaacggccctgccgccgtgcgctacccgcgcggcaatggcccgaatgcggtgatcgaaaaggaccttgagcctatcgagatcggcaagggcatcgtgcgtcgccaaggcagcaaggccgccttcctggtgttcggcgtgcaattggccgaagcactgaacgtcgccgagaagatcgacgccactgtggtcgacatgcgcttcgtcaaacccctggatgaagccctggtgcgcgagattgccggcaaccatgagctgctggtgaccgttgaagaaaacgccatcatgggcggcgccggtgcggcggtcagcgagttcctggcgcgggagaatatcctcaagtcggtgctgcacctgggcttgccggatgcgtacgtcgaacatgccaaaccggcgcagatgctggcggagtgtgggttggacgaggccggcattgaggcatcggtgcgcgagcgcatggcgttgctcggcctgtagaaaccggatcaaaaggtgggagggggcttgcccctgatagcggtggctcagtcaaaattatgctgactgacacgacgccatcgggggcaagccccctcccacatttgatttgtgccaccttcaaatgccatggacagctcatgaatcgccttcgcctcaccctgtccctgttactgttgacctccccggaactactcgccgacacccgcgacgatgcgctgaaacttcccaacgtggtcatcagcgccaaccgccaggtccaggcgcgcaacgacagcagcgccgccaacaccgtgttcacccgcgacgacatcgaccgcctgcaacccaccagcctcaccgacctgctaagccgtgtgcccggcatgcaaatagcgcccaccggtggccgtggcagcttgcccggggtctatatacgtggcaccaaatccgcacaaagcctggtgttggtggacggccagcgcattgccaataccacctccggcgacagcggcctgcaatatctgaacgtcgaccagatcgagcgggtcgaagtactgcgcggctcacgttcggtgatctacggcagcgatgcgattggcggggtgatccaggtgttcacccggcgcaatgccgggcagggcctgcaaccacgtctgaagctcgggtttggcagtaataagacctgggagcgcagcctcggcctctccggcggcgatgagtacacgcgtttcaaccttggcgcgagcctggatgaaaccgccggtatcaactcgacgcacacctcgttccccagcgatggcgaccatgatgcctaccgcaaccagtccctcagcctgaacctcagccattcgttcagcgatgcgctggaggtggggttcaacctgttggataaccggggcaagtcggaatacgacaacagcttcggccgctacgacgtcgccaccgggcaaacagcggggcaaaaaccctacaccgattacaccgtgagcagcgccagcggctatgtcgacgccacgctcaacgagcgctggcaatcgcgcctggaactgggccatagcgagaaccgcgacaccaagcgcgacaccctcagtgatgacttcagcgtgttcaacacttaccgcgactcggtcaactggcagaacgacctgacgctgaatgagcagaacagcctgattctcggcggtgactggtacgaagaccgcttccacggctccaccaccctcactgaaaacagccgctggaaccgtgcggcctttgtgcagcatcgcttccatggcgtagggttttccaccgaactgggcctgcggcgtgaccagaaccagcagtttggcgggcagaacagctggagcggcaccctgaccttgccggtcaacccggacaacgacctgctattgagctacagcgagggcttccgtgccccgacattcaatgacctgtattacccggacgagtacggcttcaagaacagcaacccgaacctgaagcccgaaacctcgaaaagctacgaagtgcaatggcgcagccaactcagcgacaccagccgtctggaagcttcgctgtaccgcaccgacatccaggatgcgatcgtgttcgacagcgacggcccgcaaaacgtcagctcagcgcgcatcaacggcttcgaagccgcgctcaagcaagagctgttcggctggcaaggcaacctggggctggcaataattgatccacgagaccgtgattccggacgtacgttggcgcgtcgcgccaggcgcaccgtgagcctggacctggatcgccaattcgaccaattcggcgtcggcgccagctggcaagcggtcagcagcagctacgacgatgcgaagaaccagcaaccgttgggtggctatggattgctcgggctgcgcgccagttggacgctgaaccatgaagtcacactgaacatgaagctcgacaacctgctggacaaagcctacagccgggcgctgtatcagtaccagggccagcaatatggctaccgggaagaaggccgggcgctgatgcttggcgtgacctggacgccggacctctagccgggcgcgatcacttcacacagtcgggccacggcttccagcatctgcccgctgggccgctccaggcctttatccggcaccagccgtacccgctcagccatcgtcggccagaccttccaggcgtccttctgcgcctggtcgcccaccagaatcatctccggatcacgctgcaacaccgactcgatgctcacctgcggcgccggcagcttgagatcatcaaacacattgcgcgcgccgcacacccttaacgcatcgctgatgatctgcccgccacccacggtgtacagcggctgattccatacctggtaaaacacgcgcaatggctcggcgcgctgatagcgctgacgcagctcggccaggcgttggcgcaactgcgcggccaactgtcgacccgcgtcagcgcgacccaattgctcggcaatggcctggacctgggtggtgagctgttcaaggctatggggttcggcgacgtacaccgggatattcaggcgctgtaactgctcacgctgggccgggccgacactgccgggccacagcaggatcaggtcgggcttgaggctgagcaggcgctccatgtccaactgaccgtattgccccactgatgtcacttgcaccaacgctgccgggcgttcgccgccgtcgagcacgccgaccagcacatcggctgcgcccagttcgaccacgatttcagagagggacggcgccaggctcaccacacgctcggccgccagcgcctgggcactgaataccagcaacactgccagccagtgacgaatcatcccagttggcggggaatgcggtagaggtagaacagcaccacggtggacagcgccaacaggaacagcggcaccgcttccaacccgacgaagaccgacaacgcgccgatccaggccggtacggccgcaaccagcaacgccgtgcgccgacgggccgccagggtgatccaggcagcgggttcttcgggggtatcgagggctttggaggtggcgatcaacgcgtgtttatagccgttgaagtagcgcaggctgaggaacatcgaggccacaccggcaatgaagaacggcatggccagcaccgggagcaaggattcggcctggccgaacaccaggttgagcacaaacagggggagcagcgccagggccaggtactgccaccaattgaaggacagtcgccgtttcacctggcctcgggtcacgcgcggtcgacctcgccctggtgctcgttgcccatcatgtggtcgagcttgctggccttggtggccaggtagagtttgttatgcgggttgtgcccggtgtgcagtggcacacgctcggccacggtgatgcccatctcggtcaaggctttgaccttgcgcgggttgttggtcatcaggcgcagggatttgacgcccaggtgctcaagcatcggcaggcagatcgcgtagtcacgctggtcggcggcaaagcccaggcgctcgttggcctcgacggtatcggcgccaccatcttgcaactcgtaggcgcggatcttgttcatcaggccaatgccacgaccttcctggcgcaggtacagcagcacgccacggccctcacgggcgatcgcgcgcatggcggcttccagttgcgaaccgcagtcgcaacgctggctgaacaacgcatcaccggtcaggcattcggagtgcacccggccgagcaccggcgcgccatcggcgatatcgcccaggctgagcacgacatgctcgcgcccggtggcttcttcgaggaagccgttcatggtgaacgtggcaaaaggggtaggcagcttggaagcggcgacgaaaacgacgggcaccgtgtgctcctgatttcagtttttacagaggcggctattgtaacagcaggttcctacagacgcttaagctgaattatcactgataaagatcaatgggttcgattggccttcatcctggttctatgcaggtcagaacggatagggttgtttccagcgctcgaatatcggctttaactcaccgcttttcaccagggccgccatgcgctggtcaaagaccgccatcaagccccggccccgctcgttatcggcaaacccgatgtacaacggcagttcggcaatcggcgtcagcgtgaacttcgacgggtcatcggcctgattgagcacgtacttggcctcggtcaacgcatctatatagaagtccgcacggccgtgttgcagcatcggcaaaatgccgtcgcgacgctcgacctggttgaaacggtgcacattgggcaagtattcctcgtacttgtagccacgcacccaggccaggcggtaattgcccagcgtagccgccgtcggcgccggcgtgctggccagcccgagggcgtagatgtggtcggaatcgaagttccagtgggggtacaacacgcctttggcttcatcgcggtaggagccgacccagccatccacctcgccgcgttgggccaggccgaccgagcgggtgtagggcacggagcgggtctgcaatttgatgccggcgggctcgaagacctgacgcaacacgtcccaggccaggcccgtgccgtctttgttggtgtagtcgttccactcctcactggccagcatgatcttgccaggcacgtcctgcgcctggaccacgcccgtaaaggcacacagcattatcagcagccagcggcgcacatccatggtgacgacctcctacagggccttgcatccttgataacgctatagagggtagcgcaggtcgccgattcagggcgcctcgcgaaaatgctgataaccacggatggccggcgtgatgtcctgcccgctgccatcgagcaacgttacgccctgccctgcctcgacccggccgatcacatggatcggccaactatcggccagcaacggcgccagttcggcggatggcagggtgaacgccagcacgtagtcatcccccccactcagggccgccacgcgtgctgcatcatcgccaacaaacgccagcagcgcctgggacaatggcaaccgctcgcgttcgatcaacaggctgacctttgacgccatcgcgatatgcccgcaatcggccaggagcccgtcggaaatatccatcgcagacgtcgccttgccacgcagcgccagacccagggccaactgcggttgcggcgaccagtaatgagcgagcaagggctcggcgatggctgtgtcggcgcagcgctggcccaataccagtggcaaggcaccggcggcattgcccaattcgccgccgacacacagcaggtcacccggctgcgcaccgctgcgggtcaaggcttgcccggccggtacacgaccaaacaccgtcagggtcaggctcagagggccacgggtggtatcgccgcccaccaggcccacgccgcagcgttgcgccatgaggttcaaaccctgggcatagcgttgcagccaatcggcatcgacggttggtgtggtcaaggcaagggtaaatgcgagggggttggcgcccatggccgccaggtcgctcaccgccacggccaacgagcgttggcccagcaggaacgggtcacaggggtcggcaaaatgcaccccggcgaccaaggtatccgtggagattgccaactgctccccagcggggagcgccagcaaggcgcagtcatcgccgatccccagggctataccttcgccgccctgcgcacagggcgcggcggcgaagtagttgcggatcagctcaaactcgcccattcaggtttcaagcgcgattcagcgcttgtacgccttcacttcggcttcacgcaggcgcggggccagcttgtcgagcacgccgttgacgaacttgtggccgtcggtcgaaccgtagactttcgccagttcgataccttcgttgatcaccacgcggtacggcacatcgacgcgatacagcagttcccaggccgacaggcgcattacgcacagctcaaccgggtccagctcttcgatggtcaggtccaggcaaggcgccagggcggtgtcgatctcgctcaggtgcgcgtgcacaccgtgcaggatgtcgtggaagtacggcaggtccgcgaaagtgaaatcgttgtcgacgcgaaactgtgcttcgatctcgttcaacgacgcgcccgccaggtgacgctgatacaacgcctgggtcgccaactgacgagcagcgcgacgcttctcgttcttcgacggtttgccagcatcggctggacgtggctcgcgcgggttgaagttgtcgctctcgtcggaaatcacttggcctccaactgcgacagcaggctgaccatttccagggcagacagggcagcttcagcgcctttgttgccggccttggtgccggaacgctcgatggcttgctcgatagaatccacggtcagcacgccgaacgcaaccggtacgccgaactccatggacacctgggccaggcccttggtgcattcgccagccacgtattcgaagtgcggagtaccgccacgaatgaccgcgcccagggcgatgatcgccgcgtattcaccccgttgagcaactttatgcgcaaccagtggaatttcgaaggcgccaggggcacggataagggtgatgtcgctttcgctaacaccgtggcgaaccagggcgtcaacggcaccgcttaccaggctttcaaccacgaagctgttgaagcggccaaccaccagggcatagcggcctttgggggcgatgaaggtaccttcgatggtcttcagggtcattcgacaaatctcttaaagagccgggacgcgtgtatgacgcgtcccttagtgatatttgaaccgcgaacaaggggcgaaaatcgccggcctttattcggagggcacgtattctactacttccaggtcgaaaccggatatcgcattaaatttcatcggtgcgctcatcaggcgcattttgcgcacgcccaggtcacgcaggatctgcgaaccggcaccgacgatgctgtaggtggtcggttttttcaccggcgcgtgatccgccgtttcgcggatatgcgccagcagcacatcgccatccaacgggtgcccgagcaacagcaccacaccgctgcctgcctcggagaccgcagccatagcggcgcgcaggctccagcggcccggctgcttgaccatcagcaggtcgcgcagagggtccatgttatgcacgcgcaccagggtcggctcttcggcgcagatgttgcccagggtcagggccatgtgcacatcgccttccaccgaatcacggtaggtcaccaaattgaattggcccagttcactgtccagtggctgctcggcaatccgctgaacggtacgttcgtggatcatgcggtagtgaatcaggtcggcaatggtgcccactttgatgttgtgttcggcggcaaaggcttcgagttcggcacgacgggccatggtgccgtcgtcgttcatcacttcgcagatcacgccgcttggctcgaaaccggccatgcgcgccaggtcgcaggcggcctcggtgtggccggcacgggccagggtgccacccggttgggccatcagcgggaagatgtggccggggctcacgatgtcttcggccttggcatctttcgcggcggcggcttgtaccgtacgggcgcggtcggcggcggaaatcccggtggtgacgccggtagtggcttcaatcgatacggtgaacttggtgccaaagcccgagccattgcgcggcgccatcaacggcagcttgagcaactcgcagcgctcacggctcatgggcatgcagatcagcccacgggcgtgcttggccatgaagttgatgtgctcaggcttgcaggcctcggcggccatgatgatgtcgccttcgttctcgcggtcttcgtcatccatcaggatgaccatcttgccttggcggatgtcttcaaccagttcttcgatgctattgagcgccacgcggcacccccttggtcaggatttcaggtagccgttagcggccagaaaactttcggtgatgttactcccggctggctctgcggccttatcgcccaacaacaggcgctccaggtaacgggcaagcaagtccacttccaggttcacccggcgaccaggctggtaagacgccatgatggtttcgctgagggtgtggggaatgatggtcagttcaaattcggcgccgttcacagcgttcacggtgaggctggtgccatcgacggtgatcgagcctttatgggcaatgtacttggccagctctttgggtgcgcggatgcggaactccacagcacgcgcgttttcgctgcgcgataccacttcgccaacgccgtcgacgtggccgctgaccaggtgaccgccgagacgggtggtcggggtcagggctttttccaggttcaccgggctgccggccttgaggtcgttcatcgcggtgcagtccagggtttcccgactgacatcggcagcaaagccgttgcccggcagttcgatgacggtgaggcacacgccgctgacggcgatactgtcgcccagcttgacgtcgcccaggtccaacttgccggtttcaaccagcaggcgcacgtcgccgcccttgggggtcatggcgcggatgctgccgatggattcgataatgccggtgaacatggccttctcctggaaaacgggacgggcacttgagcgcccggtcagaattatacgctcgcgggtggaagcgggatggcagtgactcgccagtcgtcgcctacagcgcgcatttcagtgatcttgagttggggagcgtcggccagtctctcaagcggccagtccagcaaaggccgggcggcggagccgaggaatttgccggcgatgaatatcacgtactcatccactaggtcttgctgggcaaatgcccccgccaggcttgggcctgcttctaccaacacttcgttgacgccacgggcggccaaggcgaccagcgccgagcgtagatcgacctggccatcgacgcccggcaccaccaggcattcgggaccacgagggaactggttctccgccgtcacgcaagtgatgaccaacgccggcccggccttgaagaacggcgcattgagcggcacgcgcaggcggccgtcgatcagcacacgcaacggcgggcgcgacatggccagcgccgtggtcgcttcgtccaggccgagttcggcggcgcgcacggtcaggcgggcgccatcggcgagcaccgtgtcggcgccggtcagcaccacgctggcctcggcacgcaggcgctgcacggcggcgcgggcggcggggccggtgatccattggctttcgccgctggccatggcggtgcgaccgtccaggctcatcgccagcttgacccgcacgaagggcaggccgtgttccatgcgcttgagaaaccccggattcaacgcgcgggcctgggcttccagcacgccactgaggacctcgatcccggcctgcgccaaacgctgcatgccgcgcccggccacttcggggttcgggtcctgcataccggccaccacacgtgcgacaccggccgttaccaacgcgtccgcgcacggcggcgtgcgcccatggtggctgcagggttcgagggtcacgtacaccgtggcgccacgggccttctcaccggcagcacgcagggcgttgggctcggcatggggttcgccggtgcgctcatgccagccttcgccgacaatctgcccatcgcgcacaatcacgcagcccacacgcggattgggatgggtggtgtacaaacccttgcgcgcgagttccagggcgcgggccatgtaatgggcgtcgagcaccgcttgttcggcagacggtgggttcattctttggcaggctcccgggccaggcggtcgatctcttcgcggaactcattgaggtcctggaagcgtcgatacactgaggcgaaacggatgtaggcgacttcgtcgagcttttgcagctcacccatcaccaactctcccaccaccaggctcttgacctcgcgttcgccggtggcacgcagcttgtgcttgatatgcaccagcgccgcctccagccgctcgacactcaccgggcgtttttccagggcgcgctgcataccggcacgcagtttttcttcgtcgaagggttggcggctgccgtcggatttgatcaggcgcggcaataccagttcggcggtttcgaaggtggtgaaacgttcaccgcaggccaggcattcgcgccggcgacggacttgatcgccctcggcgaccagacgcgagtcaatgaccttggtgtcgttggcaccgcagaagggacagtgcatggtgggcaggccacaaataatgggagggccatggtagcgcatccccgtggcaagacaagccatagcctttacggtatataggctgactattatgtttcatatttttttaagccacggattttgtcctttctggagccgtacatgcagttacgaccacttgttttgctcaccctgttcagtttcctggtcgcctgcagcagcgaagcccccaaaccgaccacgcctcaaccgacgcccgcacaagagaaaaaagtccccggtattgaagacctcggccccctgcccgcctatcaacgtgaaatcagcggcagcctgaccaacattccggccggtgccgaagtggagatggcgctgctggtgatcgacgaccgttcgcgcccgcaacaattgctggccagcagcgtgctgaccggtaacggcaagcccctggccttccgcctgcgcttcaatcctgaagcgttcccagcgggtgcccgggttgaattgcgtggtcgcgccagccagtccggccagttgatcctgcacctgccggccgtgcgcatcacccaggcgatcacccagaccaccggccccctgcaactcgtcaaggccccatgacgccaccgctgggcctgcaagttgccctgagcgaactgatcggcgacgcgcaattggtgccctgcccactgccgggcactgagttgtcgttgtggttgctggatgcggacaacatggaccgcgccttcagccccgaagaaacccggcgcatcctgcatgaaccgccctactggagtttttgttgggccagtggcttggcgctggcacggtacctggcggcgaaccctgagtgggtcgccggcaaacgcgtgctggattttggcgcgggttccggcgttgccgggattgcggcgatcaaggctggcgcgctggaagtggtggcctgcgacctcgacccgctggcgctggcggcctgccgggcgaatgccgaactcaacggtgtggaactgggttactccgcagacttttttgccgaagccgatcgcttcgacctgatcctggtcgccgacgtactctacgaccgcgcgaacctgccgctgctggaccagttcctgacccgaggccgcgaagcgctggtcgccgattcgcgcgtgcgcgacttccagcaccccgcttatcaaaggctggagatccttgatgcgctgacactgcctgacctggcggagccttgggagtttcgcaaggtgagcctgtaccattcgcggcgccagcccttatagttgccccattcccgctttattcgagacgccccatgagtgagcccacgccgtacatcttcgacgtcactaccgccaattttgaccaggcagtgatccagaactccttcgaaaaacccgtgctggtggacttctgggccgagtggtgtgcgccgtgcaaggcattgatgccgctgctggcgcagattgccgagagttatcagggtgagttgctgctggccaaggtcgactgcgatgccgagcaggatatcgttgcgcgttttggtattcgcagcctgccgacggtggtgctgttcaaggatggccagccggtggacgggtttgccggggcgcagccggagtcggcggtgcgggcgatgctggagccgcatgtgcagatgccaccgccggctgcggcagatcctctggaacaggcccaggcgctgtttgccgaaggtcgtatcagcgatgccgaagcggtgctggtcgcgctgttgggcgaagacaacaccaacgccgccgcgttgatcctgtacgcacgttgcctggccgagcgcggtgaattgggcgaggcccagaccgtgctggacgcggtgaaaagcgacgaccacaaggccgccctcgccggggccaaggcgcagatcactttcctgcgccaagcggccgacctgccggacgccgccgacctgaaaagccgcctggcgcaaaacccgcaggacgatgaagcggcctaccagttgacgatccagcaattggcgcgccagcagtacgacgcagcactggaaggcttgctcaagctgttcatccgcaaccgcagctacagcgaaggcctgccgcacaagaccttgctgcaggtgttcgaattgctgggcaacgatcacccgctggcgagcgtgtaccgccgcaagttatttgccgcgttgtattaatcgccgacccaactgtacagcggcgtatccccgccgctgctgacttttacctgggcactatggcgcaggcgcaccaacaggcgcttgcccaccgaggtatcgccggccaagccttccagttgatcaagcagttccagaccgctgagctggccggccttgcgcaacaggtcctgggcgccttgccacaggtcatcattgtgtttgaccggagccgccggtgcggtggtcgcgctggcagcgggcgccgcctgcaactgcgcacccagccgtgcccaatcgccgtcgtccagctccagagtcaaatccaccggcaagtcgccgaccgttccacgaattcgcaacatcgtcctcactcctgcacttttctgacgagcatgctcccatgcggcttgcgcaacgccaagcgggcggtcaaactctggcgccattgttataagatcacataacaaaactttcatgttctggagtcctctcatgcgccgtctgttgcttgctttaccgtttgccctgctgccattggcggttgcccacgctcatgatgatcacgaccatgaacacggtagccttggcgcccacgagcatggcgtaggccgcctcaacgcggtactcgacggccaggccctggagcttgaactggacagcccggcgatgaacctggtgggttttgaacacctggccaccaccccggcggacaaagccaaggtcgccgctgcacgcaaacagctggaaaaccccgtagcgctgttcaacctgcccaaagccgccggttgcgtggtcagcagccaggaactcaacagcccgctgttcggcgacaagcccgaagccgaccatgacgacgatgatgatgacgccaaagacggcgcccacgagcatcatcacgaccacagcgaaatccacgcccactaccagttcacctgcgccacgccgactgcgctgagcaacctggacctgacccaggtgttcaagaccttccccgccacccagaaaattcaggtacaactgatcggcccgagcggccagcaaggtgttgaagcaacggccactgcagccaccctgaaattctgagttcacatgacccacgcattgatcgaactgtccggcctgagcttcaactggcccggtcacccgcagttgctggacatccccgcgttccgcctggaagcgggggaaaccctgtttctcaagggccccagcggcagtggcaaaaccaccctgctcggcttgctcggcggcgtgcagaaacccagccagggcagcatccgcctgctcggccaggagctgaccgcactctcggccggtgcgcgcgaccgttttcgcgtcgaccacaccggctatatcttccagcagttcaacctgctgccgttcctgtcggtgcgcgagaacgtcgagttgccttgccacttttccaaactgcgtgcacaacgcgccaagcagcgccacggcagcgttgatcaggccgcagcagccctgctcgcgcacctgggtttgaaagacaaaaccctgctggaacgccgcgccgactcgctgtccatcggccagcaacaacgcgtcgccgccgcccgtgcgctgatcggtcagccggaactggtgatcgccgacgaacccacttcggccctggactacgacgcccgcgaagctttcctgcaactgctgttcgccgaatgccgcgaagccggcgccagcctgttgtttgtcagccacgaccagagcctggcctcgctgttcgaccgcaacctgtcgctggccgaactcaatcgcgccgccacgcccgcagaggtttgagatgtatctgttccgtctagcgatggccagcctggctaaccgccgctttaccgcgattctcaccgcgttcgccatcgcgctttcagtctgcttgttgctcgcggtggaacgcgtgcgcgttgaagcgcgcaacagttttgccagcaccatcagcggtaccgacctgatcgtcggcgcccgttccggttcggtgaacctgctgctgtactcggtgttccgcatcggcaacgccaccaataacatccgctgggacagcttcgaacacttcgccgccagcccccaggttaaatgggcgatcccgatttccctcggcgattcgcaccgcggctaccgcgtgatgggcaccaacgaatcctacttcgagcactaccaatacgggcgcaagcagaaccttgaactggccagcggccgagctttcgccaccgatcccttcgaagtggtactcggcgccgaagtcgccgatgcgctgcattacaaactcggcgacaaactggtgctggcccatggcgtcgcggtggtcagcctggtcaagcacgatgacaaaccgttcaccgtggtcggcattctcaagcgcaccggcaccccggtggaccgcaccttgcacatcagcctcggcggcatggaagcgatccacatcgactggcacaacggcgtgccggcccagggcaaaggccgcatcagcgccgaccaggcccgtaacatggacctcacgccgcaggccatcaccgcgttcatgctcggcctgaacaacaagatctccacctttgccctgcaacgggagatcaacgaattccgtggtgagccgatgctggcgatcctgcccggcgtggcgctgcaagagctgtggagcatgatgggcaccgccgaaaaagcgctgtttgtgatctcgctgttcgtggtgctcaccggcctgatcggcatgctcacggcgatccttaccagcctcaacgaacgccgccgcgaaatggcgatcttgcgttcggtgggtgcacggccctggcatatcgcgacgctgctgatcttcgaagccttcgccctggcgttatccggtgtgatcgccggcgtggggttgctgtatgtgtgcatcgccgcgtcacgcgggtatctgcaggccaactacggcctggacctgccgatgtcgtggccgagcgaatatgaatggacgctgctcgccggtatcctgggcgccgcgctgttgatgggcagcgtgcccgcgtggcgcgcctatcggcaatccctggccgacggcctgtccatacgtttatgaggaaggccttgatgcgtcgcgtcctgtttgcactgttgctgctgcttgccctgcccgcctgggcagccgagcctaaagaactgacctggtcggagctgataccgccggatgccccgccggaagtgccgaacatgcaacccctgcacaatctctccagcatggcgaatgccctggaatcggcccctgcagccaagcaggacctgcccaacgcgccggtggtgccagcgctcgatggccagcacattcgcttgcccggctacatcgtgccactggaagtcagtgaaaacggccgcaccaccgagtttttgctggtgccgtatttcggcgcgtgcatccatgtgccgccgccgccgtcgaaccagatcgtgcatgtcaaaagcgaaatcggcgtgaagctcgatgagttgtatcagccgtactggatcgagggtgcaatgcaggtcaaaccgtccaccagcgagctcgccgacgccggttaccagatggatgccgagaagatttacatgtacgaattgcctgaatagcgcttatcgccctttcattgagctgagtcaaaagaccgaacggaacgatctttaccattggacctacaacttttaaacgtcctttggagctcccatgaacaagtctctgctcggcgcgtccctcttcgcgctcgccctcgttgcccctgttgcgcacgctcacgaagcgggcgacattctggttcgtgccggtgcaatcaccgtgaacccgaaggccgacagcggccacgtcaaggttgaccaaggcccattggccggcgccaacctcggcggcaaggcgaccatgagcagcgacactcagttgggcctgaacttcgcctacatgctgaccaaccacgtgggtatcgaactgctggccgccacgccgttcgagcatgacgtgaagatcaagggcaccgccctcggcgccgccaacggcaagctcggcaccctgaaacacctgccgccgaccctgagcgtcgtgtactacccgctggataacaagtcggccttccagccgtacgtgggcgccggtatcaactacacctggatctacgacgagcacgtcggcagccgtgcccaaggcgcaggcttcagcaacttcaaggctgagaactcctggggctgggccgcgcagatcggcgccgactacatgatcaatgacaagtggatgatcaacgcccaggcgcgctacatcgacatcagcaccaaggccaccgtggacaacaacgccctgggccaaggcacacgtgccaaggtgaacgtggacgtggacccgatggtttacatggtgggtatcggctacaagttctgatgccgacctgaccagcaacacaaactcatgtgggagggggctcgcccccgatagcagtgtgtcagccaacacctagttgactgagccaccgctatcgggggcaagccccctcccacatttggagctcagtttcttcagctgtggcggtagaaccggtccagcaatgccggcaaccccgcccgccacgcccgtggcttgatgccgaacgtgtggaggatcttcttgcaagcgagcaccgcgtgttggggttcttcactcgcatccggccgggccgcatgggcctgggcggtgggggattcgatcgccaacgggtggtagttgcgcgcttcggtgaggatcgcctggcccagcgccaacggcgtggtcgcctcatggccggcatagtggtacgtgccccacagcggcgcagcgcaatcgagttgcttgagcaccgaaatgatcacccgtgccgcgtcatccaccggtgtcgggttgccgcgtcggtcgtccgccatcagcaactcatccggcttctcggcccgggccaggaagcgcccgagggtgccgtcgacgctgtcatccagcagccagccgaaccgcagcagcacatgttgcgggcaggtggcgcgcacgctctgttcgatacgccacaacgcctggccgcgcaggcccaggggcaccggctcgtctttttcgctgtaggcggtggcacgggagccatcgaacacgcgatagctggacggctgcaacaaggtgatgttgtggtgttggcacagctcggccaggcgctcgatggcgaactcctgggcagccaggcgggtttcgctgaccgcttcggcctggaaccagtcgaagtagtaggcgaggttgatcaacgcatcgggacgggtgtcgtcgagcaattgggtgaggctcgcggcatcccagccgtcttggggcggtttgggtgcgaggaaaccgatgtcttcctctgcaccgaggcgaatcagcgcctgcccgagggcattcccgccgcccagtaacataaggcgcattcgcatagattgagcaggcccggtctgtttggaacgaaggttttctggtattggccagaatcgttgcattttgcgggtttgtagcgcaaccgtcacggattaactatcttcgcatccacctccccgggctcatgctcaagggccgtgcgcgctggcaccatgacctgctgtggataagtctgcgcgaagtgcacctcggcgcagttatccacaagctttttcaggcgctggttgaacgcacggctcaccgcatactgcccgcccgacaccgtgcggaactgcgccgtcagcaccacgccgttgaggtccatcttgtccacgccaaacacctccagcggcccttgcaggttgtacttgaggaatacgtcgtcacggatcgactgccccgcttcacggatcagctccactgccttgtccacgtccgtgtcgtaggtgaactgtaccgagaagaacgcataggcaaattgccgcgactggttggtgaccgccttgatctggccgaacggcaccgagtgcacaaagcccttgccgtcgcgcaggcgcagggtgcggatggtcaggccttcgacggtgccggcatggccggagtcgagcaccacccaatcgccaatggacagggtgtcttcgatgatgatgaacaggccggtgatcacgtcctgcaccagttgctgggagccgaaaccgatcgccaggccgactactccggcacccgccagcaacggggcgacgttgatgccgaggttggccatggtggtgatcgcgcagatcaccaccaaaatgattttcaccgcattgcgcagcagcggcaggatggttttcacccgcgtgctgggctgacggctggagcgtttgttgaccggcggcttcagcgcttcctggatcgccgtgtcgagcaccacccagaacagccatgtcatcaacaggatcaggccgatgctgctgagcgagtcgctgatcgcgcgaccaatcgagttgcgctcggcgaattcaaacaacgacacgccccagatacgcccgagcacttcgataaacgccaccgccatgacgatgcgcaacagcgcatgcagcagactgaggaagcgctctttgtaggcgctgctgcgctggattgccacctggctgcgggatttgaacaggtgttgcagcaccgtactgaggaataccgtgccgatcagcaggatcgtggtgaacaacgcacagcgcagcaccttctggttgtcgtcgccggcgccgatcaggttgatcgccgagaccagcaccatcagcaggatcggccagtaccagagccccgagaagatccgcagtgattgctgcagcgccgggtgcttgaggcgctgggccaatggccgattgcggatcaggtgggcgaccgggcggcgcaggcgaaccaccagcacgccgaagatcaccgtcgcaaacaggccggtgaagaccgcgatgctgctggtgatattaccgcccaattggcgtgcgatctgcgggctggtgagcgcgtcgctgagggcggcgaggaagccgatcaggaacagcggcttggggcagtagtcgcgaataatctgcaccgccgggcgtttgtggccgacgttgaacatgacgatcacgcacaacagcattgaggtggaaaagataccgctgctggtggcgtaggcaaaacacagcgccagcgcgcggcccacggaggtcggtagaaaatggctgacatacaacgtaaggggcaggcaaaccaaagccgggagtgtgtacggcacgacatagcccagtacggcctgaaagcgtttgcgccgttcgaaaaacttacgttgccccaggcgtcgcaccatcacacgccccagtaacgtcagcagcgtaaaggcgccgacccacaccccggacagcaacagaaagtccccggcgacgctccacggcgagcgctcagcggtctggttgaccaggcggccgacttcgttcgcggcccggtcggcgcgcaggcgccattcgtcaatgaagttctggttgaggtccagcttctgctgcacatcatcaatgctggagctgatcgccccgagaaggccaccttccaccagcaactccggcttggccggcgcctcgggttccggcgcagtggccgcagcgtgtagcgcgccactgccgcaaaacagcagcacgccgagcagtaatgcaatcttgggattcagcaaaacaccgggctccttcaaaagggtctgtaaggaactgacgggtttgcgtcttgaacgttcccctctgccgtctgtaggaagccggaaactttcagccaaaaatcgcagtcagccatacacgggggccaggcccccacttttttcacaggagcaatcatggctgcgatccccgactgggtgcccatcacccccagcgtcgccatcactcgcttcacggtgttgacggtcaatatccacaagggcttcaccgccttgaatcgacgcttcatcctgcccgagctgcgtgaagcggtgcgcagtgtgggtgccgacatggtgttcctgcaggaaatccacggcacccacgagcgtcatccgcagcgcttcagcgactggccgaacatgccgcagtacgagttcctggccgacagcatctggccgcaatacgcctacggccgcaatgcggtctacccccacggcgaccatggcaacgcgttgctgtcgaaattccagatcgtgcgctacgacaacctcgacatctcccagagcggccatgaaaaccgtggcctgctgcattgcgtactgcgcctgccgggcaccggccaggaggtgcatgccgtctgtattcacctgggcttgcgcgaggtgcatcgccaacagcaattgcgcttgatcgagcagcgcatcagcgagatcccggccgatgcgccgttgattgttgccggtgatttcaacgactggcgacaaaaggccgacctgagccgcagcggcctcagagaggtcttcgtcgaaacccacggcaaacccgcacgaactttcccggcacgcctgccgttgctgccgctggaccggatctacgtgcgcaatttgaaggtgcataacgcccgggtactgaccacacggccctggtctcatctgtccgaccatgtgccgctgtcagtggagatcgagctatgaacgtcgccgtggaacacatcgccaccgaccaaccgcccgacgacgccaaggcccgcgaccgggattacggctggcagagcggcaaccaggtcgaactgctggagaatggcgaggcgtactttcccaaggtgttcgaggccatgcgcgcggcgcggcgggagatcctgctggagaccttcattctgttcgaagacaaggtgggccacgagctgcaaggcattctgatcgaggccgcgcggcgcggcgtgaaggtggtggcgagcctggacggattcggctgtggcgaattgagccagccctttcttggcgagctggccgaggctggcgtcatcgtgcagatgtttgaccccgcatccaagaccctgggcatccgtaccaattggtttcgccgcttgcaccgcaagattgtggtggtagatgccgaagtcgcgtttatcggcgggatcaacttttccgccgatcacctgggcgatttcggcccagaagccaagcaggattatgcggtgcgggtgacaggcccggcggtggccgacctgcatcatttcgccctggctcaaagtggccgccaggtgcgcacgcgacgcggttggcggcggcgccagcagcggcctgcgttgtggtccagcgacaacggtgaaggcctggtgcgcttgatctaccgcgacaacgtgcagcatcgcgatgacatcgaagaggcgtacatccatgcactgagcaaggcgcaacagcgcgtggtgatcgccaacgcctacttcttccccggctaccgcctgctacgcgagattcgcaacgccgcgcgccgtggcgtgcaggtgcaactgatcatgcagggccagcccgatgtgctgctggccaagctggcggcgcgcatgctctacgactatctgctcaaggatggcgtggtgattcatgagtactgccagcggccactgcacggcaaggtggcgctggtggatgacgaatggagcaccgtgggttcaagtaacctggacccgttgagcctgtcgctgaacctggaagccaacgtgttgattcgcgaccgagggttcaatcaacagctgtacgagcgcctggaaacactcgccaaaaaccattgccagaccatgccggaaaaccgcaagccacgcctgtggctctggcgattgaccgtgggcttcctggtgtttcatgtgatgcgtcacttccccgccttgaccggctggctgcctgcccacaagccacgcttgaaacccatcgggagccaggccaatgagcactgaatccaggtttgcacggtggaaaaaaccgctgacgattgccttcttcctactgctgatcgtgctgttcaccctgctcgctcgccgcattgattggagcgaggtggtgcagaccctgggcgacttcaaggtacgcacgctgctgatcgcaagcgcactgacgctgtgcagtttcctggtgtacgccagcttcgacttgattggccgcacctacatccgccagaacctggtgtggaagcagatcttgccggtaggcatcatcagctatgcgttcaacctcaacctgagcgcgtgggtcggcggcatcgccatgcgttatcggctgtattcgcgattgggcgtgagcaccagcaatatcgccaagattcttggcctgagcctggccaccaattggtttggctatatggcgatcgccggggtcgtgttcagcagcggcctggtcacgatgccaccggggtggaaagtcagcaccacggcattacaaggcatcggcgcgttgttggtgctggccagcctgggttacctggtggcctgtcagttttcgaaaaagcgggcgtggaccattcgcggcatggaaatcaacctgccgtcggtgcgcatggcgtgtctgcagttgctgctgggcgccttgaactggtcactgatggcggcggtgatcttcaccctgctgccggccaagctcgactatccactggtattgggggtgttgctgatcagtgcgattgccggagtgctcacccatattccagccgggctgggcgtactggaggcggtgtttattgcgctgttgcagcatgaggcctcgcggggcagtttgctcgccgggttgattgcgtaccgcgccatttatttcattgtgcctctgctgattgcgctggtgatgtacctcggtgtggaggcgaaggccaaggcgttgcgggtgaagaacacgcccgcctgattcaccgtggacgatgactcaaaccccaaagcggctgcggtaatcgctgggcgcgaggccggtgatttttttgaacgtggcgcgaaaggcaccggggtcctgatagcccaccgtccaggcgatatggtcgatagtgccgttggtgaactccagcatctgtcgcgccttgcccacgcgcaggtgctggcagtattcggtgggtttcaagcccgtggcgttgcgaaagcgccgtaggaaagtgcgctcttccaacccggcttcctgagccatcgccgcaagacagacatccaccgccccgctggcctgcaaccagtgctgaaccttgagaatggccgcatcaccgtggccaagaatcggcgcgaagttactgccacattggctggcactgtcactgtgttcgatcaccaggaaccgcgccgtgtccgccgcgatgctcgggcccataaggcggtcgaccaggcgcaggccaagttcggaccaggccatcaagccggcggtggtgatcaggtcgccgtcatcgacgataggcttgtcggcctccaggcgcaccgccgggtagcgggtggcgaaagacttggcggaagaccaatgggtggtagcgctgcgcccatcgagcagtccactgcgcgccagcatgatcgagccaatgcacacaccgcccagcaccgtgcctgccgcatgttgttggcgaatccactccagcagcgcagggggtgcctgctcttctgtaaactcgccgatcgacggcggcaccagcaccgccatcatcggttgctcgggaccgggatgactgctgaagacgcgcaccggtgtaccggcgctatccacctgccaatggctgacccgtagcaatggcaactgcgcggattgatgctcggcggcgatgcgattggccacgccgaacaggtcagtcaagccgtgcacggcggccagttgcgccccctggtagatcaacacacccagctcaaccacgaccattgtcagttttccccctgttattgtcggtgcagccaatcctaagtgcggacgccagctaagatactgggccccatcaacccatcacgaggcaacacacatggccaagcaagcgctcatcctaatcgatatccagaacgactacttcccccagggcaagtggccacttgacggcgtggacgccgcggcggacaaggctgcacaggtgctgcaggcgtttcgcaagacgggtgatgcggtgattcatgtacgtcatgagttcacctccgatgacgcgccgttcttcacgccgggctccgagggcgcgcacctgcatggcaaagtgctgaaccagggcaatgagccggtggtgctcaagcatttcgtgaatgcgtttcgcgaaaccaacctgcgtgccctgctggaacagcgcagcatcacggacctggtggtggtcggcagcatgagccatatgtgcatcgacgcggtggtgcgggcggcggcggacctgggctacacggttacggtgattcatgacgcctgtgcgacgcgggacctggagttcaatgggcaggtgattccggcggcgcaggtgcatggggcttatatggcgtcgctggcgtttgggtatgcgggcgtggtatcggcggatgaatacttgaaggcgcaagcggcggcggcatgaccgccacttgtcgctgcggcgtcagcgggtcgcgatgatgaacaggcgcggaaacggcagcagcacggtgccatcggccagggctggataagcctgggtgatccgcgcctggtattcctgtaggaacgcggctttttcatcgccagtcaacagtgcgagaaagggtcgcagcgccgaggctttgaaccactccaccactgccgcgtgatccgccagcgggtgcagataggtggtgcgccacacatcgacggtactgcagtgctgactcagcagctcgtagtagtaactcgcggcgtggcgctcattgtgtttgaccgcgccgatttttgcagaccaggggccatcggcggcgacttcgcgggccagccggtgggcgggctcatccagattgtccggggtttgtaccgccagcgtaccgccaggggtcagttggcggaccaggtgcgggtacagcgcggcgtggtccggcaaccattgcagggacgcgttggccaggatcacatcgaaggcttgcgcaggcttccaggcaccgatatccgccagttcgaagttaagcgccggtagccgcttgcgggcgtcggccagcatgtcatcggagctgtccatgccggtgacatgggcttgaggaaagcgctcggccagcacttcagtggagttgccgggtccacatccaaggtcaacggcattgcgtacctcggtattcgcaatggccgcgaccagatcacggacaggacgggtgcgctgctgttcgaacatcgtgtactgcttggctgaccaggtcatcacggctttccttctttttgagggtggctgcaagcctaaatcttgtgagcaatgagaacaaatgccaggattgacgcactcccatacctgaaaagtatcccgatgctggaacttcgccaactcaaggccttcgttgccatcgccgaagaaggctacatcacccgtgccgccgaacgcctgggcatgcagcaaccaccgttgacgcggatgctgcaaagccttgaagccgagttaggcgtggtcttgatggagcgcttgccccgtggcgtacgccccactacggccgggctcgcgttactggacgaagcgcggcagattctcgcccaggcagatagggttgcagaggtggtgcgccgtgccgcacgcggtgaacgggggcgcctggcaatcggcttcaccagctcggcggcgctgcatccctttgtgccgagcgttttacggcggtttcgcgaaacctttgtcggcgtgacagtggtgctggaggaagccgggaccggcgaactgctggacgcgttaatacacgagaagctcgacgccgcgtttatccgctcgcccctcagcgggacgcaatcgttgcaggacgaaccgatcctggtagaacccatgttgctggcgctaccgacggagcatcccttggcaatcgattcaggatcgcccctgcccttggcggcattggcgacggagtctttcgtgctgtatcgccggcgcgtggggttgggcttgtatgacgcgattctggtggcatgccgagaagctgggttcagcccgcaggtggtccaggaagccccgcgcatgaccgcgaccctgagcctggtggcggcggggcttggggtgtccattgtcccggcgtcgatgcagcgcttgcgcggggatggcatcgtttatcgggcgttgacggagtgccgcagcctggtggcgccgttgcatctggcgacgcggatcgatgacagttcggcggtgttgcagcggttcaaggagatggttgtcaccgccgcgtcgactgaagctgaccacgggtaataaaaaacccccgaggcctgagccagcgggggttctgtgtgttccgggttttaaacctcagaacgggatatcgtcatcaaagctgtcaaaatccggagccggctgcggagcggcctgctgtggcgctggacgcgactcacgctgcggctgctggcttggctgcggacgcgactgctgtggacgcggtgccgagttggacatgccgccctggccctgttggtcgccctgaggacggccgcccagcagttgcatggtgccttgcatgtcgaccacgatttcagtggtgtaacgcttgatgccgtctttttcccactcgcgggtctgcagcttgccttcgatgtagacctgcgaacctttgcgcaggtactcgccggcgatctctgcgaccttgccgaacatcgacacacggtgccattcggttttctcgaccttctggccggtctgcttgtcggtccactgttcgctggtcgccagactcaggttggtcacggcgttaccgttaggcaagtagcgaacttcgggatcctggccgcacgtaccgaccaatatgactttgttaaccccacgggccataacgttctcctaggctgggcgcgctgtcggcactgggttgaccagctgctcgagcgtcgcgcgatccaataattcggtgtccaatttgatgtagatggcggcttcttcagcaacaaccacggcatcggtaaccccagtaacggccttaaggcgctcgaccagaccggcttcgcggatcgcttcgggcgataacggcaaacgcagactcgtcacatagggaggttcgcgcatggtaacagcaaaggctagccagagggcagccagacctgcgcatccaaggaacacaaccgacaaaccgccatgctggaacatccagccacccatgatgccgcccagtgcggaacccaggaactgactggtggaatacacccccatcgccgtccctttgccgccggccggtgaaactttactgatcagcgaaggcagcgatgcctccagcaggttgaacgcggtgaagaacaccaccgtgccgattaccagcgctcgcaggctgtcgccgaactgccagaagaatagctcagtgagcatcagcgtcgcgacggcgccgagcaaaactcgtttcattttgcgtttcttctcgccatagatgatgaacgggatcatggcgaagaacgaaatcagcaacgctgtgaggtagacccaccagtgctgctccttgggcaggccggcttttgacaccagcgccaggggcaaggcgacaaagctgcacatcagcatggcgtgcaacacaaagatacctaaatccaggcggagcaggtccgggtgcttgagcgtcggcaacagggctttgcgcgcaacgccggactcacggtgctgcaacgtgccggtggagcgcggcaccataaaggccacgatcacgatgccgaacagtgccatgccgccggtggcgagaaacagcccgtgcagcccgaacgcgcgggtcagcaaggggccgaccaccatggccacggcaaacgacaggccgatggtcatgccgatcatggccatggccttggtgcggtgttgttcgcgggtcaggtccgacagcaacgccatgaccgcagcggaaatcgcgccggcgccttggaggatacgcccggcgatcacgccccagatggaatcggcttgagccgcgagcacgctgccgagggcaaacacgatcagccccaggtagatcaccgggcggcgaccaatgcggtcggaaatgatcccgaacggtatctgaaaaatcgcctgggtcaggccgtaggcaccaatggccaggccgatcaatgcgggggtcgcgccagcgagatccatgccataggtcgccagtaccggcaacaccataaacatgcccagcatacggaaggcgaacaccagggccagaccgcttgccgctcgggtctcgccgctactcatgcgttcgctgtggggatcgtgcatggaaaaacctcgtgtgaaccggcggcgattctaccagtcccatcgattgagagggtatatgcggcgctttgccgcgcagctttcatctaaggctgcacacggccttttgacagtgtatattcatccagtctttagccgtatactccggcattatttatgcccgccgtgcgaggccatcttggacaagatcctgattcgtggggctagaacccacaacctgaagaacatcgacctgaccctgccccgggacaaactgatcgtcatcaccggcttgtccgggtccggcaaatcgtcgctggcgttcgacacgctgtatgccgaaggccagcgccgctatgtggaatcgctgtcggcctacgcccggcagttcctgtcgatgatggaaaagcccgatgtcgacaccattgaaggcttgtcgccggcgatctccatcgagcagaagtcgacctcccataacccgcgttccaccgtgggcaccatcaccgaaatctacgactacctgcgcctgctgtatgcacgcgtgggtattccgcgttgccctgaccacgacatacccctggaagcccagaccgtcagccagatggtcgacctggtgctggcccagccggaaggcgccaagctgatgctgctggcaccggtgattcgtgagcgcaagggcgaacacctttccgtcttcgaagagctgcgggcgcaaggttttgtgcgggcacggatcaacggcaagctgtatgagctggacgaagcgccgaagctcgacaagcagaagaagcactcgatcgatgtcgtggtcgaccgcttcaaggtgcgcgccgacctgcagcagcgcctggcggaatccttcgaaaccgcattgaaactggccgacggtattgcgctggtagcaccgatggacgacgaaccgggcgaagagatcatcttctccgcccgctttgcctgcccgatctgcggccatgccatcagcgagttggaacccaagctgttttccttcaacaacccggccggcgcctgcccgacctgcgatggcctgggcgttaagcagttcttcgatatcaagcgcctggtcaacggtgacctgacgctggcggagggcgccatacgcggctgggacaggcgcaacgtctattacttccaaatgctggggtcgctggcgtcgcactataaattcagcctcgaagtgcctttcaatcaactgccggcggaccagcagaaagtcatccttcacggcagcggttcgcagaacgtcgacttcaagtacctgaacgaccgtggcgatatcgtcaaacgctcccacccgttcgaaggcatcgtgccgaaccttgagcgtcgctaccgcgagaccgaatcggccagcgtgcgcgaagagttggcgaaattcctcagcacccagccttgcccggattgccgcggcactcgcctgcgtcgtgaggcacggcatgtgtgggtcggcgagaagacattgccagcggtgaccaacctgccgatcggtgatgcctgcgaatactttggcgtgctcaagctgaccggtcgccgtggggagatcgccgacaagatcctcaaggaaatccgcgagcggctgcagttcctggtcaacgttggcctggactacctgtcgctggatcgcagcgccgataccttgtctggcggtgaagcccaacggattcgcctggccagccagattggcgccggtctcgtgggggtgttgtacattcttgatgagccgtccattggtttgcaccagcgggacaacgatcgcctgctgggtacgttgaaacacctgcgggatatcggcaacacggtgatcgtggtcgagcacgatgaagacgcgattcgcctggcggattacgtggttgatatcggcccgggcgcgggcgtgcatggcggacatattgtcgccgagggcacgcctgcagaagtcatggcgcacccggactcgctgaccggtaagtacctgtccggccgggtgaagatcgaagtaccggcaaagcgcactccacgtaacaagaagctggcgctgcacctcaagggcgcacgcggcaacaacctgcgcaatgtagacctggaaatcccgctggggctgctgacctgcgtgaccggtgtttccggctccggcaagtcgacgctgatcaacaacacgctgttcccgttgagtgccactgccctgaatggcgcgaccaccctggaagcagcggcccatgacagcatcaagggcctggagcacctggataaggtggtcgatatcgaccaaagcccgattggccgtaccccacgctccaacccggcgacctacaccggactgttcacgccgattcgtgagctgtttgcgggcgtaccggaatcacgctcacggggctacggaccgggtcggttctcgttcaacgtcaagggcggccgctgtgaagcgtgccagggcgatggcttgatcaaggtggagatgcacttcctcccggacatctacgtgccgtgcgatgtgtgtaagagcaagcgctataaccgcgaaacgctggagatcaaatacaagggcaagagcatccacgaaaccctcgagatgaccatcgaggaagcgcgggagttcttcgacgccgttccggcactcgcgcgcaagctgcagaccctgatggatgtgggcctgtcgtatatcaagctggggcagtcggcgaccacgctgtccggtggtgaagcgcaacgggtgaaactgtcccgcgagctgtcaaagcgcgataccggcaagaccctgtatatccttgatgagccgaccaccggcctgcacttcgcggatatccagcaattgttggacgtgctgcaccgcctgcgcgaccacggcaacaccgtggtagtgatcgagcacaaccttgacgtgatcaagactgccgattggctggtagacctcgggccggaaggtggttccaagggcggtcagattatcgctgtgggcacgccggagcaggtctccgaaatgccgcagtcgcacactggttactacttgaagccgttgctggagcgcgaccgggcctgactttttcaggctcaataaaaagcccctgtcactttacggtgacaggggctttttcgtatccgggaatcagaactgcgattgcaggtaattctccaggccgatcagcttgatcaggcccagctgcttttccaaccagtaggtgtgatcttcttcggtgtcattcaactgcacgcgcaggatttcccgcgtgacaaagtcgctgtgctgctcacagagctcgatgcctttgcaaagcgcagcacggaccttgtactcgagacgcaggtcggcagcgagcatgtcagggaccgtggtgcccacatccaggtcatccggacgcatacgtggcgtgccttcgagcatgaggatacggcgcatcagtgcgtcggcgtgctgtgcctcttcttccatttcgtggttgatacgctcgtagagctcagtaaagccccagtcttcgtacatacgcgagtggatgaaatattggtcacgagccgccagttcgcccgtcagcaacgtgttgaggtaatcgattacgtcggggtgaccttgcatcgccctacatctccctgcttgaaagtctgtagtttgaaccatgatgactcgaaggtcacgggaccaacggcagaaaagtgaagattttccgagaaaagtggcggaattaacgcaaaaaccgcccaaatgagggcggttctgcttatcgtttagagtcagttaagcgatacacccagcgcctttgcgattgcttctccataagccggatcggccttgtagaaatgctgcagttggcgctgaaccacgtcagtggaaacaccccccattgcgccggcaatgttgttggtgagcaagtctttctgctcatcgctcatcaagcggaacagtgcaccggcatggctgtagtaatcggtgtcttcacggtgatcgtagcgatcagccgcaccgctcaaggccaaggcaggctcagcgtactgaggagcctgtttcggcgcatcggcgtagctgttcggctcgtagttaggtgcagcaccgccgttgctgccgaacgccatcgaaccatcacgctggtagctgttcaccgggctacgtggggcgttcaccggcaagtgctggtgattggtgccgacacggtagcggtgggcatctgcgtaggcaaagacacgaccttgcagcatgcggtctggcgacaggcctacgcctggaaccatgttgctcgggccgaatgcggcttgttccacttcagcaaagtagttctgcgggttgcggttcaactccagttcgccgacttcaatcaaagggaattccttctgcgaccaggttttggtcacatcgaaaggattctcgtaatgagcgttggcctgggcctcggtcatgatctggatgcacacgcgccatttcgggaaatcaccgcgctcgatcgcaccaaacagatcgcgctgggcatagtccggatcagtaccggccaggcgagcagcttcggcgggtgccagattcttgatgccctgtttggtcttgtagtgccacttgacccagtgacgctcgcccttggcgtttatcaggctataggtgtggctgccaaagccgtgcatgtggcggtagccatcagggatgccacggtccgagaacaggatggtgacctggtgcagcgcctctggcgagtgagaccagaagtcccacatcatttgcgcgctcttcaggttgctttgcggcagacgcttctgggtgtggatgaagtcagggaacttcaatgggtcgcgaatgaagaataccggggtgttgttgccaacgatgtcccagttgccttcttcggtatagaacttcagggcgaagccgcgtgggtcgcgctcggtatccgccgaaccgcgttcgccacccactgtggagaatcgcaagaaggtaggcgtttgcttaccgacggactcgaacagtttggcgctggtgtattgagtaatgtcttgggtaaccgtgaaggtgccgtaggcacccgagcccttggcgtgtacgcggcgctccgggatgttttcacggttgaagtgagcgagcttctcgatcaggtgaaaatcgtcgaggagcaacggaccgcgcgggccggcagaacgggaattctggttgtccgcaacgggagcgccgctggcggtagtaaggattttattctggctcatgttcaatttccctcaggtcagacttggaactgccggctaatcggcttggagggagtattgatcatcaatatgacgtctacaaattcattaaattgtaggcttcgatagaaaataactaccaaactccccgcgactcatagtgccaagcacaaccgacagaaaattgtacaaatcgcgcttttcttacgcgcacaaaaaaccgggcactaggcccggttcttcgttacagcttgtcgtcttactcggcgcttacagcttcgccagcagtagcacgatcaaccaactcgacgtacgccataggcgcgttgtcgccagcgcggaaaccgcacttgaggatgcgcaggtagccaccctcacgggtagcgtaacgcttgcccagatcgttgaagagcttaccaacgatagctttcgaacgagtacggtcgaaagccagacggcggttagccaggctatctgtcttggccaaagtaatcagcggctcagcaacgcgacgcagttctttagctttcggcagtgtagttttgatcagctcgtgctcgaacagcgacaccgccatgttttggaacatggccttgcggtgcgagctggtacggctcaggtgacgaccacttttacgatgacgcatggttcattccttaccaaactcacgttcggtgattacgacgatcaggcagtcgccttgtcgtccttcttaagacttgcaggcggccagttgtcgaggcgcatgccgagggacagaccgcgggaggccagaacgtccttgatttcagtcaaggatttcttgcccaggttcggagtcttcaacagttctacttcggtacgctgaatcaggtcgccgatgtagtaaatgttttccgccttaaggcagttagccgaacgtacagtcagttccagatcgtcaaccgggcgaagcaggatcggatcgatctcgtcttcctgctcgattaccactggttcgctgtcacctttgaggtcgacgaacgcagccaactgctgttgcaggatggttgcagcgcggcggatagcctcttcaggatccagagtaccgttggtttccagatcaataaccagcttgtccaggttagtacgctgctcgacacgggcgttttccaccacgtatgcgatgcggcgaaccgggctgaacgaagagtcaagctgcaagcgaccaatgctgcggctttcgtcttcatcgctctgacgcgagtcggccggttcataaccacgaccacgagctacggtgagcttcatgttcagggcgccgttagacgccaggttagcgattacgtgatcggggttaacgatctcgacatcatgatccagctgaatatcggcagcggtaaccacccccgaacccttcttcgacaaggtcagcgtaacttcgtcacggccgtgcagcttgatagccagacctttaaggttcaacaggatttcaattacgtcttcctgtacaccttcgatggcgctgtactcgtggagcacaccgtcaatctcggcctcgactactgcacagccgggcattgaggacaacaggatgcggcgcagcgcgttgcccagggtgtggccaaaaccacgctcgagaggctcgagagtaattttggcgcgggttggactgacaacctgcacatcaatgtggcggggtgtcaggaactcatttaccgaaatctgcatggatgcacctattttctagcccttacttggagtagagctcgacaatcaggctttcgttgatgtcggcggacagatcactgcgagcaggaacgttcttgaaaacgcccgacttcttctcagtgtctacttctacccattctacgcggccacgttgggcacacagatcgagagcttggacaatgcgaagttggttttttgctttctcgcgaactgcgaccacgtcaccagcacgaacctggtaggacggaacgtttacggtctgaccgttaacgctgatcgacttgtgcgataccagctgacgggattcggcacgagtcgaaccaaagcccatacggtatacaacgttgtccagacggcattcgagcagttgcagcaggttttcaccggttgcacctttcttgccagcagcttctttgtagtagccgctgaactgacgctcgagaacgccgtagatacgacggaccttctgcttttcacgcagttgggtgccgtaatcggactggcgaccgcggcgttggccgtggataccaggtgctgcttcaatgttgcacttcgattcgatcgcgcgcacgccgctcttcaggaagagatcggtgccttcgcgacgagcgagtttgcattttggaccaatgtaacgagccattctttacaatctcctggattacacgcggcgcttcttcggcggacggcacccgttgtgcgggattggcgtcacgtcggtgatgctggcgatcttatagccacagccgttcaaagcacggacagcagactcacgacctggacctggacctttgacgttaacgtcgaggtttttcaggccgtattccagcgcagcttgaccagcacgttcagcagctacttgagcagcaaacggggtggacttgcgggaaccgcggaaacccgaaccaccggaggtagcccaagaaagcgcgttaccttgacggtcggtgatggtcacgatggtgttgttaaaagaagcatggatgtgggcgatgccatcaaccactgtctttttaacttttttacgaggacgagcagcaggttttgccatgataattttcctgtcgattcgctggggcgattacttgcggatcggcttacgcggacctttacgggtacgcgcgttagtcttggtacgctgaccgcgcactggaagaccacgacgatgacgcagaccgcgatagcaaccgaggtccatcaaacgcttgattttcatgttgatttcgcgacgcaggtcaccttcagtggtgaacttcgccacttcgccacgcagcaattcaatctgctcgtcgctcagatccttgatcttagcggctgggtttaccccagcaactgcgcaaattttctgcgcagtagtgcgaccaacaccatagatgtaggtcagcgagataacagtgtgcttgttatctggaatgttaacgcctgcaatacgggccattcagtgggactccaattgacagctacctacgccccggaagccaagaaatagggcgcgagataatatcgctgtaataacaaataatcaacccggcagcgcactagctgccgggcttcaagcggatcacactcagccttggcgctgtttgtgacgcggttccgcgctgcaaattactcgaacaacaccttcgcggcgaataatcttgcagttacggcacagctttttcaccgatgcacgaactttcatcaccaactcctcgaaccttatggggtactcagcgcaacatgccgctgccgtagcccttcaggttggctttcttcatcagggattcgtactggtgcgaaacgaggtgcgattgtacttgggacatgaagtccatcacaaccacgaccacgatcagcaacgaggtcccgccaaggtagaacggaacgtttgctgcaaccaccaggaactggggcaacaagcacacggccgtcatatatagagcaccgaacagggtcaaacgagtcagaacgccatcaatgtagcgtgcagactgctcacctggacggatgcccggaataaaggcaccggacttcttcaggttttccgctacgtctttcggattgaacatcaacgccgtatagaagaagcagaagaaaataatccctgcactaaacagcagaatattcaacggctgaccaggagcgatcgactgagagaggtcctgcagccagcccatattttcagactgaccaaaccaggtacccaacgaagccggaaacagcaaaatgctgctcgcgaaaattgccggaataacaccggccatattcactttcagcggcaagtggctagtctgcgcagcaaaaaccttacggccctgctgacgcttggcgtagtgaacagcaatacgacgctggccacgctcaatgaacaccacaaaaccgataatcgctactgccagcaaaccgatggcaaccaaggcaaaaatgttgatatcaccctgacgtgcagactcgaaagactgcccaatcgctctcggaagaccggcgacgatacctgcgaaaatcaacatcgagataccgttgccaacaccacgctcagtaatctgctcacccagccacatcatgaacatcgcaccagccacaaaagtggataccgcgacgaaatggaagccaaagtcaccagtgaacgcaacaccctgcccggccaggccaacggacatgccgatagcttggaccaaggcgaggatgacagtgccgtagcgggtgtactggcttatcttgcgacggccagcttcaccttccttcttcaactgctccagctgcggactgacggcggtcatcagttgcatgatgatcgatgccgagatgtacggcatgatccccagtgcaaagatgctcatccgttccagcgcgccgccggaaaacatgttgaacaagctaagaatggtcccctcattctgtcgaaacaggtctgcgagtcggtccgggttgatacctggaaccgggatgtgtgcgcctattcggtagacgataatcgccaggaacagaaaacgcagacgagcccaaagttcagacataccgcctttgccgagcgctgagagagcaccttgcttagccatttattcctcgaacttgccgccagctgcttcgatagccgaacgcgcacctttggtggcgccgattcccttgccgatagtgacagcgcgagtcacttcaccggacagcatgattttcacgcgctgtacgttgacgttgatcacgttggcatctttcagggtctgcacagtaacgatgtcgccttccactttagccagctcggacagacgcacttctgcgcgatccatggctttcagagaaacgaaaccgaacttaggcaggcgacgatgcagcggctgttgaccgccttcaaagcctggagcgatggtgccaccggagcgggaggtttgacctttgtggccacggccaccagtcttacccaaaccgctaccgataccacggcccggacgatgcttttcgcgacgggaacccggcgctggactcagatcattgagtttcatcgattaaccctctacacgcagcatgtagtaagccttgttgatcatcccgcgattctcgggagtatcctggacttctacagtgtgaccgatgcgacgcagacccaaacctttaacgcacagtttgtggttagggatgcggccggtcatgcttttgatcagcgttactttaacggtagccatgatcagaagatctccttgacagtcaggccacgcttggcagcgatggactcaggagattgcatagctttcaaacctttgaaagtggcgtgaaccacgtttaccgggttagtcgagccgtagcacttggccagaacgttctgaacgccagcaacttcgaggacagcacgcatagcgccgccagcgatgataccggtaccttcagaagcaggctgcatgtacaccttcgaagcgccatgggcggacttcattgcgtactgcagagtggtgccgttcagatcaacttggatcatgttgcgacgagcagcttccattgccttctggatcgcagcaggcacttcacgtgacttgccacggccgaagccaacacgccctttaccatcacctaccacggtcaacgcggtgaaagtgaagatacggccgcctttaacggttttggctacgcggttaacttgaaccagcttctcaatgtagccttcgtcgcgcttttggtcgttatttgacataacttagaactccagcccagcttcacgagcagcatcagccagcgctttcacgcgaccgtggtacttgaagccagagcggtcgaaagccacttgcgagacgccagcggccttagcacgcgtagcgaccagctggccaacctttgtggccgcgtcgatgttgccggtggcaccatcacgcagttctttatccaaagtcgaggcgcttgccaggactttgttgccgtcggccgagatgacctgggcgtagatgtgctgcgacgagcggaacacgcagagacgcacgacttcgagttcgtgcattttcaggcgtgctttgcgagcgcgacgcagtcgagtaacttttttgtcggtcatttgctatgccctacttcttcttggcttctttacgacggacgacttcgtccgcgtagcgcacacctttgcctttgtacggctctggtggacggaagtcgcggatctcagcggccacttgacctaccagctgcttgtcgatgcccttgatcaggatatcggtctggctaggagtctcagcagtgatgcccgctggcagttcgtaatccacagggtgcgagaagccaagggccaggttcaaaaccgtgccttttgcttgcgctttgtaaccaacaccgaccagctggagcttacgctcgaagccttggcttacgccttggaccatgttgtttaccaacgcacgcgtggtaccggccattgcgcgagtttgttgatcgccattgcgagcagcgaaacgcagctcaccagcttcttcaacgatctcaacggacgaatggatgttcagttcaagagtacccttggcacccttcaccgaaagctgttggcctgcgaatttgacttcgacaccggctggcagcttaacggggttcttagcgacgcgagacatgcttatccccccttagaacacagtgcaaagaacttcgccgccgacaccggcagcgcgcgcagcacgatccgtcatcacacctttgttggtggagacgatagacacgcccagaccgccacgaactttcggcagatcttcagcggacttgtactgacgcaggcctggacggctaacgcgcttcacttcctcgatgaccgaacggccttcgaagtacttcagctcgatggacagcagtgcttttacatcgctgctgatctgataacccgcaatgtagccttcgtctttcaggactttggcaacagctaccttcaacttggaagatggcatgcttacgacggacttttcagccatctgggcattacggatacgagttagcatgtccgctaacgggtcctgcatactcatgggctagacgctcctaatacaaaaaaattagccttgcggctacatatgtcgccgagaatctccgggtaaaacacacgggctcaggcgagccgcgtattttagacacactccagaaatgaaacaagccccaaaaggggcttgttccagattcaaggtcaccggtggtcgttatcttgcgattcgaaccacctggacttcgaaagtacttaccagctggctttaaccagacctggtacgtcaccacgcattgccgcttcacgcagtttgttacggccgaggccgaacttgcggtaaacgccgtgtggacgaccggtcaggcggcagcggttacgcatgcgcgaggcgcttgcgtcacgtggctgcttctgcagggcaactgtcgcttcccaacgtgcttctggacttgcgttcagatcaacgatgattgctttcagtgctgcacgcttcttggcgtacttggcaaccgtgagctgacgcttcagctcgcggtttttcatgctcatcttggccatggtcctactccaatcagttgcggaacgggaatttgaaagcacgcaacagggcgcgaccttcatcatcgttcttggcagtggtggtcagggtgatgtccagaccgcggagagcatcgatcttgtcgtagtcgatctccgggaagatgatctgctctttcacgcccatgctgtaattaccacgaccatcgaaggacttggcattcaggccgcggaagtcgcgaacccgaggcagggagatcgacagcagacgatccaggaactcatacatacgctcacggcgcagggtcactttgacgccgatcggccaaccttcacggactttaaagccagcgatggatttccgagcgtaggtcacaacgactttctggccggtgatcttttccaggtcagcaacagcgtgctcgatgacttttttgtcaccgatcgcttcgcccagacccatgttcagggtgattttggtaacgcgcggaacttccatcacgttcccaagcttaagttcttccttaagcttaggggcgatttccttccggtaaatctcttgtagtcgtgccatggtctaatctacctagcagtgttcaagcatcaaccgctttttgggtcgacttgaagacacgaattttcttaccgtcttctactttgaaaccaacgcggtcagccttgttggtttcgccgttgaagatggcgacgttagaagcgtccagcggagcttctttctcgacgataccgccctgcacgcccgacatcgggttaggcttggtatgacgcttgaccaggttcagaccaccgataaccagacggttattagcgagaaccttaagcaccttaccgcgcttacctttgtctttgccggcgatcacgatgatctcgtcgtcacgacgaatcttttgcatgtcggatctccttacagcacttctggggcgagcgagacgatcttcatgaacttctcagtacgaagctcacgggtcactggcccaaagatacgggtgccgatcggctcttgcttgttgttcagaagaacagcagcgttgccatcaaagcggataatggagccatcagcacgacgtacgccgtggcgagtgcggactacaacagcagtcatcacttggccttttttcactttaccgcgaggaattgcttccttcacggtaactttgatgatgtcaccgataccagcgtaacgacgatgggagccacccagcaccttgatgcacataacacggcgagcgccgctgttatcggccacatcgagcatggattgagtctgaatcatataatttctccgacccctagtccttagacttccacagcgcgttcgagaacatcaaccagtgcccaagacttggtcttggccagcggacgagtttcacgaatagtgactttgtcgccgatgtggcactgattggtttcgtcgtgcgcgtgcagcttagtcgaacgcttaacatatttaccgtagatcgggtgcttaacgcgacgctcgatcagaacggtgatggttttgtccatcttgtcgctgacaacacggccagtcagcgtacggacagtcttttcggcttcagccatgatcacttacctgcctgctggttgagcacagtcttcacgcgagcgatgtcacgcttaacttgcgagagcagatgagactgccccaactggccagttgctttctgcatacgcagattgaactggtcgcgcagcaggccgagcagttgctcgttcagctgctgtgcggatttttcacgaagttcattcgctttcatcacatcaccgtccgtttaacaaaggaggtggcgagcggcagctttgcagcagccagggcgaaagcctcacgcgccagctcttcagaaacaccctcgatttcatacaggactttgcctggctgaatctgggctacccagtattccacgttacccttacctttacccatccgaacctcgagaggttttttggagatcggcttgtccgggaatacacggatccagatcttgccgccacgtttcacgtgacgggtcagtgcacgacgcgctgactcgatctgacgagcggtgagacgaccacgagctacagacttcagcgcgaactcgccgaagctgactttgctaccgcgctgagccagaccacggttgtggcctgtcatctgcttgcggaacttcgtacgcttaggttgcaacatttggcgtaccccttacttagcagcttttttacgaggcgctggtgcttgtggtttcagttcttcttggcgaccaccaattacttcgcctttgaagatccaaacctttacaccgatcacaccgtaagtggtgtgagcttcgtagttggcatagtcgatgtcggcacgcagggtgtgcagtggcacacgaccttcgcgataccattcagtacgtgcgatttcagcaccgccgagacgaccgctcacttggattttgatgcctttggcaccaatgcgcatggcgttctgtacagcgcgcttcatagcgcgacggaacattacgcgacgctccagctgctgagctacgctctgcgcaaccagcataccgtcgagctccggcttgcggatctcttcgatattgatgtgcacaggcacacccatttgcttggtcaggtcctgacgcagtttctcaacatcttcacctttcttcccgataacaatacctggacgagcggtgtggatggtgatacgtgcagtttgcgccggacgatggatatcgatacggcttacggacgcgctttttagtttgtcttggagatactcacgcaccttcagatcagcgaacaagtagtccgcataagtccgaccgtctgcgtaccagacggaggtgtgctccttgacgattcccaggcgaatgccaatgggatgtactttctgacccatctcttcgactccgttacttgtcagcaaccttgacagtgatatggcaagaccgcttgacgatgcgatcagcacggcctttggcacgtggcatgatgcgcttcagcgaacgcccttcgttgacgaaaacggtgctgaccttcaggtcatcaacgtctgcgccttcgttatgctcggcgttggctacggccgactccagcactttcttcatgatctcggcggctttcttactgctgaaagccaacaggttgagcgcttcgcccaccttcttcccgcggatctggtcggcgaccaagcgggctttctgggcggagattcgagcgcccgacaacttagcggctacttccatttccttaccccttaacgcttggctttcttgtctgccacgtgcccacgataagtgcgggtaccggcaaactcgcctagtttgtggccgaccatgtcttcgttcacgagaactgggacgtgcaagcgaccgttgtgtacagcgatggtcagaccgaccatttgtggcaggatcatcgaacgacgcgaccaggtcttaactggtttgcgatcgttcttttccgccgccacttcgatcttcttcagtaggtgaagatcaataaaaggaccttttttcagagaacgtggcactgtcgtatccctctatttacttgcgacgacggacgatcattttgtcggtacgcttattaccacgagtcttcgcgcccttagtcgggaagccccatggcgataccggatgacgaccaccagaggtacgaccttcaccaccaccgtgtgggtggtcaaccgggttcatggcaacaccacgaacggttgggcgaacgccacgccagcgtttggcaccagctttacccagcgaacgcaggctgtgctcggagttcgagacttcgcccagggtcgcgcggcattcagccagcactttacgcatctcaccagaacgcagacgcagggtcacgtagacaccttcacgagcgatcagctgagccgaagcaccagcggaacgagcgatttgcgcgcctttacctggcttcaattcgatgccgtgtacggtgctaccaactggaatgttgcgcagttgcagagcgttgcccggcttgatcggtgccagggcacctgcgatcagctggtcgccagcgctcacgcctttaggggcaatgatgtagcgacgctcgccatctgcgtacagcagcagagcgatgtgagcagtacggtttggatcgtattcgatacgctcgacagtggcagcgatgccatctttgtcgttgcgacggaagtcgaccagacgataatgctgcttatggccaccaccgatgtgacgagtggtaatacgaccattgttgttacgaccaccagacttcgattttttctcgagcagcggtgcgtgaggagcgcctttatgcagctcctggttgaccaccttgaccacaaaacggcggccaggggaagtcggtttgcatttaacgattgccatgatgcaccccttccttactcagcactgctgctgaaatcgagatcttggcctggctgaagggagataactgccttcttccagtcattacgcttgcccagaccgcgagcagtgcgcttgctcttacccagaacattcagggtagtaacacgctctactttcacgctgaacaggctttcgacggccttcttgatttccagcttggttgcgtcagttgcaaccttgaaaacgaactggcctttcttgtcagccagaaccgtagccttttcggaaacgtgcgggccaagcagaactttaaatacgcgttcctggttcatcccagcagctcctcgaatttcttcacggccgacacggtgatcaacaccttgtcgtatgcgatcagactaactggatcggaaccttgcacgtcacgtacatcaacgtgtggcaggttgcgagcagccaggtacaggttctgatcaacagcttccgacacgatcaaaacgtcggtcaggctcatgttgttcagtttgcccagcagatctttggttttcgggctttcaacagcgaagtcctgaaccacgaccagacggtcagtacgcacgagttcagcaaggatggagcgcagagctgcgcggtacatcttcttgttgagcttctgcgagtgatcctgcggacgagctgcgaaagtggtaccgccgccacgccagattgggctacggatagtaccggcacgagcacggccagtacctttctgacgccaagggcgcttaccgccaccacgtacgtcggaacgggtcttttgctgcttgctaccttgacggccgccggccatgtaggccacgactgcttggtgaaccagcgtctcgttgaattcgccgccaaatgtcagttcggaaacttcgatcgcttgagcgtcatttacatttaattgcatgtcagcttccccttaaccgcgagccttggccgctggacgtacaaccaggttgccgccagtagcgccaggaacagcacccttgaccaacaacagattgcgttcagcgtcgacgcgcactacttcgagggactgcacggtcacgcgctcagcgcccatatgaccggacatttttttgcccttgaatacacgaccaggagtctggcactggccaatagagcccgggacgcggtgggaaacggagttaccgtgagtgttgtcttggccacggaaattccaacgcttgatcgtaccctggaagcctttacctttggactgaccggttacatcaaccagttgaccagcagcgaagatttcagcgttgatcagatcgccagcctggtagtcaccgtcttcaagacggaactccataacagtgcgaccagctgcaacgtttgctttagcgaagtggcctgcttgagcagcagtcacacgcgaagcacgacgctcgccgacagtgacttgcactgcacgatagccatcggtttcttcagttttgaactgggtgacgcgattcggctcgatctcaatgaccgtgaccggaatggagacaccttcttcggtgaaaatacgggtcataccgcatttacgaccgactacaccaatagtcatgttgtaaacctcatgagtgtacggggctttcacccgctatggccgcccatttcagagcgttacacgactaagacccgagtcttagccgaggctgatctgtacttccacaccggccgccagatcgagcttcataagtgcatcaacggttttatccgttggctggacaatgtccagtacgcgcttatgagtacggatctcgtactggtcacgcgcgtctttgttgacgtgcggggagaccagaacggtgaaccgctctttacgggtaggcagtggaattggaccacgcacttgtgcaccagtacgtttcgcggtttccacgatttcctgggtggattggtcgatcaggcgatggtcaaaagccttcaacctgatacggatttgctgattttgcattggatttcagactccggctgctattcccagcgagcgcaatacgcccgttaaaaggaggcgcaattctatagacggccctgataggtgtcaacccaataaaaaaggcccccgctgagcgggggccttttcaaaacatcagagctatctcagaagagataattactcgatgattttagctacgacgccagcaccaacggtacggccgccttcacggattgcgaaacgcagaccgtcttccatagcgatggttttgatcagggtgacaaccattttgatgttgtcgcctggcattaccatttctacgccttccggcagttcgcagttaccagtcacgtcagtagtacggaagtagaactgtggacggtagcctttgaagaacggagtgtgacgaccgccttcttctttgctcagcacgtacacttcagcttcgaacttggtgtgcggcttaaccgaacctggcttaaccagaacctggccacgctcaacgtcgtcacgcttggtaccacgcagcagaacgccgcagttctcgccagcacgaccttcgtcgagcagcttacggaacatttcaacaccggtgcaggtggtgacggtagtgtcacgcagaccaacgatttccagtggatcttgaaccttgacgataccgcgctcgatacgaccagttacaacagtaccgcgaccggaaatcgagaatacgtcttcgattggcatcaggaacggcttgtcgataacacggactggatctgggatgtagctgtccagagtctcaaccagcttacgaacggacgtggtgcccatttcgttgtcgtctttgccttccagagccatacgagcagaaccgatgatgatcggagtgtcgtcacctgggaagtcgtaagtgctcagcagatcgcgcacttccatctcaaccagttccagcagctcagcgtcgtctaccaggtcagccttgttcaggtaaaccacgatgtacggaacgcctacctggcgggacaacaggatgtgctcacgggtttgtggcatcggaccatcagcggccgagcaaaccaggatagcgccgtccatttgagcagcaccggtgatcatgttcttcacatagtcagcgtgacctgggcagtcaacgtgagcgtagtgacggatcagcgagttgtattcaacgtgcgcggtgttgatggtgataccacgagctttttcttctggcgcgctgtcgattttatcgaaatcaacgattgcggaaccgaaaacttcggagcaaacgcgagtcagagcagcagtcagagtggttttaccgtggtcaacgtgaccgatggtgccaacgttgacgtgcggtagggaacgatcaaatttttctttagccacgacaattaactccttgcctaaaggactgaatcagccttgttttttggatacagtttcagcgatgtgcgccggagctgtgttgtattttttgaattccatagagtagcttgcgcgaccctgggacatggagcgaacgtcggtcgcataaccgaacatctcacccaacggaacctcggcgcgaatcactttgccggaaaccgtgtcttccatacccaagatcatgccgcgacgacggttaaggtcgcccatgacatcacccatatagtcttcaggtgtaacaacttctaccgccatgattggctcaagcaactcaccaccgcccttctgggccagttgcttggttgccatggaagcagccaccttaaacgccatctcgttggagtcgacgtcgtggtaagaaccgtcaaaaacggttgctttcaggccgatcagcggatagccggcaacaacaccgttcttcatctgctcttcgatacccttctggatagcagggatgtattccttaggaaccacaccacctactacttcgttcacgaattgcagaccttcctgaccttcgtcagcaggagcaaaacggatccagcagtgaccgaactgaccacgaccgccggactgacgaacgaacttgccttcgatttcacagtttttcgtgatgcgctcacgataggaaacctgaggcttaccgatgttggcttcgacgttgaactcacggcgcatccggtcaaccaggatgtccaggtgaagctcgcccatgccggagatgatcgtttgaccagtctcttcatcagttttgacgcggaaagatggatcttcctgagcaagcttgcccagagcgatacccattttttcctggtcatccttggtcttaggctctacggcaaccgaaataaccggctccgggaagtccatgcgaaccaggatgattggcttggcagcgtcgcacaaagtctcacccgtggtgacgtccttcatgccgatcagggccgcgatgtcaccagcgcgcacttccttgatctcttcacgggcgtttgcgtgcatttgcaccatacgacccacgcgctctttcttgcctttaaccgagttgatcacgccgtcgccggaggccaacacgcccgaataaacgcggacgaaggtcaaagtacccacgaatgggtcggtagcgatcttgaacgccagagccgagaacggctcgctgtcatcggcgtgacgctccatttcttcttcctcgttatcagggttggtacccttgatagcaggaatgtcggttggagccggcaggtagtcgataacggcgtcgagaaccaggggaacacccttgttcttgaaggaagaaccgcaaacagccaggacgatctcaccagcgatagtacgctgacgcagagcagccttgatttccacgttggtgagctcttcaccttcgaggtacttgttcatcagctcttcgctggcttcggccgcagcctcaaccatgttgttgcgccactcgtcagccagttcctgcaactctgcagggataggcttgcgaacaggaaccatacctttgtcggaatcattccagtaaacagcttccatgttgatcagatcaatctgaccctggaagttgtcttcggaaccgatagccaattggattggcaccggggtgtgacccagacgctgcttgatctgaccgatcacgcgcaggaaattggcaccagcacggtccatcttgtttacataaacaagacgtggaacgccgtacttgttggcttggcgccatacggtttccgactgaggctcaacacccgaagtaccgcagaacacaacgacagcgccgtcgagtacgcgcagggaacgctcaacttcaatggtgaagtctacgtgacccggggtatcgattacgttgaagcgatgctcgtctttgtactgcttctcggaacctttccagaaggcggtaatagcagcagaagtaatggtaataccacgctcctgctcctgaaccatccagtctgtggtcgcggcgccatcatgcacctcgcccattttgtgacttttgccggtgtaaaacagtacgcgctcggtggtggtggttttaccagcatccacgtgagcaacgataccgatgttacggtagcggctaatcggagtagtacgagccataaagccctcgcaaaattagtgaagctaagattagaagcggtagtgcgagaaagctttgttagcttcagccatacggtgcacgtcttcacgcttcttaacagcagcacctttaccttcagcagcgtccaacagctcgccggccaaacgcagagccatagacttctcgccgcgcttacgggcgaagtctaccaaccagcgcattgccagagcgttacgacgggacgggcgaacttcgaccggaacctggtaagtagcaccgcctacacggcgcgacttcacttcgaccagcggagcgatggcgtcgagagctttctcgaagatttccaggggatcgctgttcttgcgttctttaaccttctccagcgcgccataaacgatacgctcggcaacggctttcttgccgctttccatcacgtggttcatgaacttggccaggatttggcttccgtattttggatcgtcaagcacttcgcgcttggctgctacgcgtcttcttggcatggataagccctcaaacggtcttcaggttcgctcggaatcggtgccctttcgggacgcctccgaccttactcttatcgactcagaaaataagatgattcagtgttacaaaaagccgctactacttaggcttcttggtaccgtacttcgaacgaccctggttacgacctttaacgccggaagtatccaaggagccgcgtacggtgtggtaacgaacacctggcaagtcttttacacgaccgccgcggatcagtaccacgctgtgctcttgcaggttgtgaccttcaccaccgatgtacgaggaaacctcgaaaccgttggtcaggcgcacacggcatactttacgcagtgccgagttaggttttttcggcgtagtggtatacacgcgagtgcatacgccacgacgttgcgggcagttctgcagcgcaggcacgtcggatttctcgacgatacgcttacgcggctgacgtaccagctggttgatagttgccatctactagctccactgttgtcttgcgacgctattgtcttgcaagaaaagcaaaatggcaggaacgaattcccgccaaatttaggggtacaagagtctaaagaggatcttgtccccagtcaaggcaaggccccgacctcccctctcatcgaaccgggacaaaactgcctcgatccgacgaatgggggctgccagggcccggacttatttatcgcagaactcagttaccgctggagttcagcgcttcggtcagtgcagcttccacttcactggcgcttacgcgcaacggcttgtcagcatcacggcggcgcttacgctcgctgtggtaagccaaaccggtaccggctgggatcaaacgacccacaactacgttttctttcaggccgcgcaggtaatcgcgcttgccggttaccgctgcttcggtcagtacgcgggtggtctcctggaaagaggccgccgagatgaacgattcagtcgacaacgacgccttggtgatacccaacagcacgcgagtgaacttggacacgaatttgtcttcggtcgccaagcgctcgttttccaccagtacgtgagtcagctccatctggtcgcccttgatgaaactggaatcgccggattcagcgatttcaactttacgcagcatctgacgcaggatggtctcgatgtgcttatcgttgatcttcacgccttgcaggcggtaaacgtcctggatctcgttaacgatgtacttggccagcgcacttacacccagcagacgcaggatgtcatgtggatcgcttggaccgtcagagataacttcgccgcggtttacctgttcgccttcgaagacgttcaggtgacgccacttcggaatcagctcttcatacggatcgctaccgtcgttcggggtaatgaccagacggcgcttgcccttggtttccttaccgaacgcgatggtgccgctgacttcagccagaatcgacgcttctttcggacgacgcgcttcgaacaagtcggcaacacgcggcagaccaccggtgatgtcacgggttttcgaagtttcttgcgggatacgcgcgataacatcaccgatggcgatcttcgcaccatccgctacaccgaccagggcgttggctggcaggaagtactgagcgattacgtcagtgcctggcagcaacagatccttgccgttgtcatcgaccatcttcacggctggacggatgtccttgccggcagctggacgatctttcgcgtcgagtacttcaatgttggtcataccggtcaattcgtcagtctgacgcttgatcgtgatgccttcttccatgcccacgtaggtcacggtacctttcatttcggtaacgattgggtgagtgtgcggatcccacttggccacgattgcgccagcgtcgaccttgtcaccttctttaaccgaaatcacagcaccgtacggcagcttgtaacgctcacgctcacgaccgtagtcatcagcgattgccagctcaccggaacgggacacagcaaccaggtggccatccactcgctcaacatgtttcaggttgtgcagacggacagtaccgccattcttcacctgaacgctgtcggctgcggaggtccggcttgccgcaccaccgatgtggaatgtacgcatggtcagctgggtaccgggctcaccgatagactgggcagcgataacgccgaccgcttcaccgatattcacctggtgaccacgagccaagtcacggccgtagcatttggcgcagatgccgtagcgggtttcgcagctgatcggcgagcgaacgatcacttcgtcgatgctgttgagttcgatgaactcgacccacttctcatcaaccagggtgccggcaggaacgataacttcctcggtacctggcttgaatacatcacgggcaataacacgacccaatacgcgctcacccaacggctctacaacgtcaccgccttcaatgtgcggcgtcatcagcaggccatgctctgtgccgcaatcgatctcggttacaaccagatcttgtgcaacgtctaccagacggcgagtcaggtaaccggagttagcagttttcaacgcggtatccgcaagacccttacgagcaccgtgagtcgagatgaagtactgaagtacgctcaaaccttcacggaagttcgcagtgatcggcgtttcgatgatggaaccgtccggcttggccatcaagccacgcataccggcgagctgacggatctgcgcagcagaaccccgtgcgcccgagtcggccatcatgtacatcgagttgaaggactcttggtcaacttcgtcgccgtgacggtcgatgactttctctttcgagaggttggccatcatcgccttggaaacttcgtcgttcgccttggaccaaaggtcgattaccttgttgtacttctcgccctgggttaccaggccggaggcgtactggctttcgatctctttcacttcatcagtggcagcactgatgatgcgggctttttcatccgggataacgaagtcgttaacaccgatggaaacgccagaaatggtcgaataggcaaaaccggtgtacatcaactggtcagcgaagatcacggtctctttcaaaccaaccacgcggtagcactggttgatcagcttggagatcgccttcttcttcatcggcaggttgacgacgtcgtacgacagaccttttggcacaacctggtacaacaacgcacggccgacagtggtgtcgacaatacgagtgttgctcacgctgccgccatcacgatcgttgacggtttcgttgatccgcactttgaccttggcgtgcagtgcggcttcgccggcacggaacacacggtcaacttcttgcaggtcagcgaacacacgaccttcgcccttggcgttgatcgcttcacgcgtcatgtagtacagacccaatacaacgtcctgcgacggaacgatgattggctcaccgttggctggcgacagaatgttgttggtcgacatcatcaacgcacgcgcttccaactgggcttccagtgtcagcggtacgtgcacggccatttggtcgccgtcaaagtcggcgttgtacgcagcacagaccaacgggtgcagctggatagccttaccttcgatcagtaccggttcaaacgcttggatacccagacggtgaagggtcggtgcacggttgaggagaaccgggtgttcgcggatcacttcggcgagaacgtcccaaacctctggcagttcgcgctcgaccattttcttggcggctttgatggtggtcgcaagaccgcgcatttccagcttgccgaagatgaatggcttgaacagctcaagtgccatcttcttaggcagaccgcactggtgcagacgcagggtcgggcctacggtaattaccgaacgaccggagtagtcaacacgcttaccgagcaagttctgacggaaacgaccttgcttacccttgatcatgtcagccagggatttcagaggacgcttgttcgaaccggtgatagcgcggccacgacgaccgttgtcgagcagggcatcgacagcttcttgcaacatacgcttttcgttgcgcacgatgatgtccggagcggacagatcaagcaggcgcttcaagcggttgttacggttgatcacgcgacggtacaggtcgttgaggtcggaagtcgcgaaacgaccaccatccaacggtaccagcggacgcaggtctggcggcagaaccggcagaacggtcagcaccatccactctggcaagttgccggaaccctggaaggcttccatcaacttcagacgcttggacagcttcttgatcttggtttcggagttggtttgcggaatctcttcacgcagacggccaatctcgtgctccaggtcgatagcgtgcagcagttcgcggacagcttcggcacccatgcgggcatcgaaatcatcgccgaactcttccagcgcttcgaagtactgctcgtcgttcagcagttgacctttttcaagggtggtcatgcctggatcgataacgacatagctctcgaagtagagaacacgttcgatatcacgcagggtcatgtccatcagcaagccgatacgggacggcagcgatttcaggaaccagatgtgggcaaccggcgaagccagttcgatgtgcgccatgcgctcacgacgaaccttggccagtgcaacttcaacgccgcacttctcgcagatcacaccacggtgcttcaagcgcttgtacttaccgcacaggcactcgtaatccttaaccgggccaaagatcttggcgcagaacaggccgtcacgctcaggtttgaacgtacggtagttgatggtttccggctttttaacttcaccgaacgaccacgaacggatcatctcaggcgatgccaacccaatacggatggcgtcgaactcttcgacttgaccctggtttttcagcaaattcagtaggtctttcaaggcctttcctcctggcggagcagagagcgggctaaacagccccgctctcgattcgcgtcacgtgttattcggtttccagatcgatatcgatgccgagggaacgaatttctttgatcaacacgttgaaggactcgggcatgcccggctccatacggtgatcgccgtccacgatgtttttgtacatcttggtccgaccgttcacatcgtccgacttcactgtgagcatttcttgcagagtgtaagcagcaccgtatgcttccagtgcccagacctccatctccccgaaacgctgaccaccgaactgagccttaccacccagcggctgctgggtaaccaggctgtacgaaccggtagaacgagcgtgcatcttatcgtctaccaagtggttcagcttcagcatgtacatgtagccaacagtaaccggacgctcgaacttgttgccggtacggccgtcgaacagctgcatctggccgctttctggcaggtccgccagtttgagcatggccttgatttcgctttccttggcaccgtcgaacaccggggtagccattggaacaccgccgcgcaggttcttcgccagatccaggatttcctggtcggagaaggtgtccagctcttcgttgcgaccgccgatctcgttgtagatctcgtgcaggaacttacgcaggtctgcaaccttgcgctgctcttcgatcatacggttgatcttctcgcccagacctttggccgcgaggcccaggtgagtttcaaggatctgaccaacgttcatacgcgaaggtacgcccaacgggttgaggacgacgtcgaccggggtgccattggcatcgtgcggcatgtcttcaaccggcatgatcacggagaccacacctttgttaccgtgacgaccggccatcttgtcgcccggctggatgcggcgacggattgccaggtaaaccttgacgatcttcagcacgcctggagccaggtcatcgccctgctgcagtttgcgcttcttgtcttcgaacttgtcgtccagcagacggcggcgatcaacgatgtaggcctgggctttctcgagctgctcgttcagagcatcttcagccatgcgcagcttgaaccactggccatgctcaagaccgtcgaggatttcgtcggtgatgtcctgacctttcttcagacctgcgccgccttcagccttgtggcctaccagggcagaacgcagacgttcgaaggtcgcgccttcaacgatacggaactcttcgttcaggtccttgcggatctcgtcgagctgggtcttctcgatggacagtgcacgagcatcacgctcaacgccgtcacgggtgaagacctgtacgtcgatgacagtacctttggtaccggtaggtacacgcagggaggtgtctttaacgtcgctggctttttcaccgaagatggcacgcagcagtttttcttccggggtcagttgggtctcgcctttcggagtgaccttgccgaccaggatgtcgcctgcgcctacttcagcacctacgtaaacgataccggcttcgtccagtttgttcagtgcagcttcacccacgttcgggatgtctgcagtgatttcctctgggccaagcttggtgtcacgggccacacaggtcagttcctgaatgtggatcgtggtgaagcggtcttcttgaacgacacgctcggacaggcagatggagtcttcgaagttgaagccgttccatgccatgaacgcgatgcgcatgttctgacccagtgccagttcacccatgtcggtggacgggccgtcggccatgatatcgctacgctgaacgcgatcacccttgctcaccagcggacgctggttgatgcaggtgttctggttcgagcgggtgtatttggtcaggttgtagatgtcgacaccggcttcgccagtttcaacttcgtcatcggcaacacgaaccacgatacggctggcatcaacggagtcaattacgccgccacggcgagccacgacgcaaacgccggagtcacgggctacgttacgctccatgccggtacctaccagcggcttgtcagcgcgcagggtcggtacagcttgacgctgcatgttggaacccatcaacgcacggttggcgtcatcgtgctccaagaacgggatcagcgacgccgctaccgaaactacctgcttcggcgaaacgtccatcaaggtgacgtcttccggcgccttgacggtgaactcgttcaagtgacgaaccgctaccagctcgtcgatcaggactttcttgtcgttcatcgtggccgaagcctgagcgatcacgtgatcagcttcttcaatggcggacaggaacacgatctcgtcggtgaccagagcgtctttcaccactcggtacgggctctcgaggaagccatactggttggtgcgcgcataagcggccagggagttgatcagaccgatgttcggaccttccggcgtttcgatcgggcaaacacgaccgtagtgcgtcgggtgtacgtcacgaacttcaaagccggcacgctcacgggtcagaccgcccgggcccagtgcagaaacacggcgcttgtgggtgatctcggagagcgggttgttctggtccatgaactgggacagttggctggaaccgaagaactctttcaccgccgcagccactggcttggcgttgatcaggtcttgcggcatcaggccttcgctttcagccatcgacagacgctctttgaccgcacgctcaacacgtaccaggccaacgcggaactggttctcggccatttcgcctacgcagcgaacacgacggttacccaggtggtcgatgtcatcgacgatgcctttaccgttacggatgtcgaccagggtcttcagtaccgcgacgatatcttccttgcacagcacgcccgaaccttcgatttcggtacgaccgatacgacggttgaacttcatccggccgaccgcagacaggtcatagcgctcagggctgaagaacaggttgttgaacagggtctcggcagcgtctttggttggcggctcgcctggacgcatcatgcgatagatctcgaccagcgcttccaattggttgctggtggagtcgatcttcagagtgtcggagatgaacggaccgcagtcgatgtcgttggtataaagggtctcgatgcgaacgacctgagccttggcgattttggccaggatctcggtgttcagctcggtgttgcactcagccaggatttcgcctgtcgccgggtgaacgataaccttggcggtagtgcgacccaggacgtagtccagaggcacttccagctctttgataccggctttttcgatctggttgatgtggcgcgcagtaatacgacggccagcctcaacaatgaccttgcctttttcatcctggatgtccaggacggcaatttcaccacgcagacgcgaagcgatcagctccagcttgagggtttcatccttcaggctgaatacgttggtggtgtagaaggcgtcgagcacttgctcagtggtatagccgagcgcgcgcagcagtaccgaggccggcagcttgcgacgacggtcgatacgcacgaacacgcagtctttcgggtcgaactcgaagtccaaccacgaaccacggtacggaatgatccgcgcggagtacaggagcttgccggagctgtgcgtcttgccgcggtcgtggtcgaagaacacgcccggggaacggtgcagctgggaaacgataacacgctcggtaccattgattacgaaggtaccgttctcagtcatcaatgggatttcacccatgtagacttcttgctctttgatgtccttgatcgctttgttcgacgattctttgtcgaaaatgatcagacggacttttacccgcaaaggtacggcgtacgtaacaccgcgcaacacgcattctttgacatcaaatgccggttcgcccaggcgataaccgacgtactccagcgcagcattgccggagtagctgatgatcgggaaaacggatttgaaggccgcatgcaggcccacgtcgcggaactgatctttggtcgctcccgcctgcaagaattcacgatacgaatccagctggatagccagaaggtacgggacatccatgacgtccggcaacttgctaaagtccttgcggatacgttttttctcagtatatgagtaagccatcagcgttccccagcttggtcacctgcttgtttggcccctccgacgggagcagccagaaaatcttgcaaaccccatggtttgcaccaccgcatcgggtggttacagcgcgttattggcggcgaccgagtcgacagccaagaacggaaaaaggccggtggcaagagccaccagccatcagccttcagcttaacgcttgggctggagacgcaaggtcgatgcttacttcagctcgactttagcgcctgcttcttccagcactgctttcgctttgtcagcggcgtctttcgacactgcttccagaacctgggcaggagcgccgtcaactacagccttggcttctttcaggcccagaccggtcagttcacgtactgccttgatcacgtttactttcttctcgccagcttccagcagcatgacgttgaattcggtttgctcttcagcagcaacagcagcaacagctgggccagcggaagcagcggcagcggaaacgccgaatttttcttcgaaagctttgatcagctcaacaacctgcagaaccgacatttcagctacggcgttgaggatatcgtcttgggagatagacattgctgtatttcctgaattgggggacggcctactcggccatcgaaataaacaaaaatacgcgagagaagtcgctcagccttaggctgcggcagcttctttttgctcgcgaactgcggccagagtacgagccagcttgctggtagcgccttgaatcacgctcatcagctgcgaaatggcttcgttgcgggtcggcagtgttgccagtacgtcgatttggttagctgcgaggaacttgccctcgaacgcagctgccttgatctcgaacttatcctgactcttggcaaattccttgaacaaacgggcagcagcgcctggatgttctttggagaacgcgatcagagtcgggccggtgaacacgtcgttgaggacactgtattcagtgtcagcaacagcgcgcttgagcagggtgttacgtacaacacgtacgtatacgccagcttcacgagcctctttacggagtccggtcatagcgcctactgtcacaccacgggcatcagccacgacagcggacagagcagctttggcagcctcgttgacttcagcgacgatggccttcttgtcttcgagattaattgccacgggtttaactcctgcttgttaccgtttcatctggccgaagccggatgtcgttttggtgtctgattcggtaaggaaccgggagcaccatctgcgtaggcttgtggtttaagacttgcgtcgcctacggtcttggatagcccccgccaggcagggaccccaattttttcaattggcgcgatcgctcgcaccaatttgtgtcttatacgtccagcgagccttggtcgatgaccagacctgggcccatagtggtgctcagggtaacgcgcttgacgtagatacctttcgaagaagctggcttgatacgcttcagatcagcgatcagggcttcaacgttttccttcaacttgacggcatcgaagccgactttgccaacggaggtgtgaatgatgccgtttttgtcagtgcgataacgaacctgaccagccttggcgtttttgaccgcagtggctacgtctggcgttacggtgccgactttcgggttaggcatcagaccacgtggacccaggatctgacccaactgacctacaacacgcattgcatccggggatgcaataactacgtcgtagttcaggtcgccgcctttcatttcggcagccaggtcgtccatgccaacgcgatcagcgccagcggccagagcagcttcagctgccgggccttgggtgaagacagctacacgtacagtcttgccagtaccgtgtggcagcacagtagcgctacgaacgacctggtcggatttacgtgggtcaacacccaggtttacagcaacgtcaacggactcgctgaacttgacagtcgacagctcggtcagcagggcagcggcgtctacaaagttgtaggccttgcctgcttcgattttgccggcgatagccttttggcgcttggtcagcttagccattacacaccctccacgttaaggcccatgctacgagcagaaccggcgatggtacgcacggctgcatccatatcagctgcagtcagatccgcgtttttggttttcgcgatttcttccagctgagcacgagttacggtgccaaccttaacggtgttcggacgagcggaaccgctagtcagaccagcagctttcttcaacagaaccgaagccggagtcgacttggtttcgaaagtaaagctacggtcgctgtatacagtgatgatcactggagtcggcagacctggctcaagaccctgagtacgggcgttgaaggccttgcagaattccatgatgttcacgccgtgctgacccagagctggaccgacgggtgggctagggttggcctgagcggccttcacttgcagcttgatgtaagcggtaatcttcttggccatgaggcactccaattacgggttcgaacgcctcgaaaggctccccggttacttgcgcgtttatcccagtgacgacaaaaccccacagcctaaggctgtggggttgggatgcttgctcagctagaccttctcgacctggctgaactccaactctaccggagtagagcgaccgaaaatgagcactgccacttggatccggctcttttcgtagttaacttcttcgacagtaccgttgaaatcagcaaacggaccatctgtaacacgaacaacctcacccggctcgaaaagcgtcttcggcttaggcttgtcgctaccatcagcaacacggcgcagaattgcttccgcctccttgtcagtgataggagcaggcttatcagcagttccgccgataaaacccatgacacgaggagtgtccttgaccaaatgccaagtaccttcattcatgtccatctgaaccagcacatagccagggaagaacttgcgttcgcttttgcgcttctgaccattccgcatttcaaccacttcttcagtgggaaccagaatttcgccgaagccatcttccatgcctgccagctttacgcgctccagcaaagagcgcataacatgcttctcgtaacccgagtaagcatgcacaacgtaccaacgcttagccacgggacacccttagccaacaatcaaggaaacaagccagccgagcagggaatcgagcccccacaacagcaacgccataaccagaacaacagccacgacaatcaatgtggtctgcgtagtttcttggcgagtcggccaaacgactttacggatttcggtgcgagcttcctttaccaggaccgcgaaagacttgcctttggcagtctgcaggcctacaaaggcagctacagcagcgagaacaagcaaagcgagtacgcggtacaggatcggcgaagcagaatagtactgattgccaacaacgcctacgaccaccaaggcaaccacagcgagccacttgaccagatcgaaacgagagctttgagcttcagccttaggagtcatctatgaagatcctgtgaaaagaaagccagacacaccacgtgaatctggcaggtcaggagggaatcgaacccccaacctacggttttggagaccgtcgctctgccaattgagctactgacctaaaacaaaatcaggccgaccattatgcaggcctgaaaaagactttacaacaaccaaccccactagacctgaaatcacctggcaacaacgccagacagaacaccttcaagccgaggcagctgttaaaacaaaggcagatattttcatatctgccttgttatatggagctcttgagcggatttgaaccgctgacctcacccttaccaagggtgtgctctaccaactgagctacaagagcaaaacacctgcacaacctgcaaacttggagcgggtagcgggaatcgaacccgcatcatcagcttggaaggctgaggttctaccactaaactatacccgcggagcttgcagctcacgctaaaaatggtggagggggaaggattcgaaccttcgaagtcgtagacgtcagatttacagtctgatccctttggccgctcgggaacccctcctaagcgagccggcattttacattacgccgaccttctgtcaagcattttctcatttaaaaatatgaggttagctgcattgaccttcgcttcacactattgacctagaaggtcttcactgcgaagcgggcgccattctatgcaaactattcgagagttgcaacgccttcgcacaacattattttatgttttaactcattgaattccttagcaaggttttcaaagggcagatcgtcagccaggcgtcgactttcaggggctacacgcagccagtagccagaggcatcagccgtattgagcaactggaccttgaccttgatatccaagctcgtgagtcgctgctcaacggactgcgcctggcgctggtccgcaaaaccaccgatgtacaggcaagtgttttgcgcctcggatgtttttgcgcgatccctgcgcaccaccgcatcagaagattcactgagtagtcggatgtcttgctgcgagcccttgtaaaggctcaagggcgtgacatccttagcgcgcaatggcgcttcttgctggtgccagatgtagtagaaggcgttgagaaccagtaaaagcaaaaacagccaacgcataatcacctcaggacaaaggacaagccatcgccaaaccgacaaagaccagatcgggcacgagccgcgcctggggcaccgcatccgctaccaaatcagcatccccgccggtcaggaacacggtaaagtcatccccccagtagctcctcgccaactccaactgagtcagtacaaaccctctgagcatcaacgtacagccgcgctcaacggcttctaccgtcgtacggcccggagagagacgctccagcgccctttcagcggcagcgtcgtcgtagcgtatcttgcgcgtgtgggttcgcaactgattgcgcataaggggcattccaggacaaatgaacccacccaagtgctcaccgtccacagcaataaaatctgcagtggcggccgtaccaaaatcaagcaccaggcaggccccacgcgcgagcttgaacccacccagcatcgccagccagcgatcaagcccaagacgttcgaaatcttcgtatccgttgcgcactcccgccatttctcgcgccggggccgcgcaggaaacgataacgccgaaagtgtcttgcaaggcagtgaccaacttgcttgtttcttccagggcacgaacgcttaccaatcggcaacgtgtcagtagaagcccagaaagcgctaccaggctctcaatcaacgccagatccgagcctacaaccccttctgcggaggtattcgccgattccgaatcaagcacacgccatttgataaagctatttccacagtcgagctcaagaatcatcacgcaacctcaggcttaactcaccaccactgtatattttctcaacaccattaacactcaagcgcaatgccccctggcgatctacacccagcacaaccccatcgacctggttgacacccgcggtaagggagaccggccggccctgccaggcgtgattctgctcccactctccctgaagcgcgacaaaaccgccttcccgatgccgctcaaggtagccttgcagctgccgccccagttccgacaccagaagattgcgattcaccggagcacccgtctcaagttgcactgaggtccattgctgatcaacctcatcagccctctgcatattcacgttgatacctattccgagaactacgtgacagatatccgcaggatcacctaccaactccagcaaaattccagcgattttcttctgccctaccaaaacatcgtttggccacttcagggcggcgccctgcaccccggactcgcgcaaagcctgcatgactgccaagcccacaaccaggctcagcccctccagctgtcgcagacctgactcaatacgtaaaacgagactgtaataaacgttttgcgcgaacgggctgatccactttcgtcccctcctacctcttcccgcagtttgttgctctgcgagcaccaggaacggcgccgcgcatccagcgtctaccagccgcaaagcttcagcattagtggagtcaatggaatcagatatatgaacgggccatgtcaaggatggcgtactctgcgaaatatcttcagcactcaagaacactagtggggatgccaattgataccccttgcctcgcaccttgtgaattggcagattcaactctgcctccaggtgctggagttgcttccatacagcactgcgactgacgccaagagcggcacccagtgcttctccggaatggaatcggccatctttcagaagtttcaacaacgtcagcatgcaagtatcgcctcacaatgaggcacgcatgatagccatgcgcagggtcattgcatagaaaggccggactttagcgctggaggccacgcacgcggatctcttcgcacttttcgaccgcccaaaacaaaacccctgactgcataagcaatcaggggttctggaatttaatcttgacgatgacctactctcacatggggaaaccccacactaccatcggcgatgcatcgtttcactactgagttcgggatgggatcaggtggtt

SEQ ID NO: 55 - DNA, 43047 bp, Pseudomonas nodulensis
cgctttcgaccgagaggatcgaaacgttaatagagccagacaacactgctctaccaactccttctgggcttcgatgaactgaagcaagtcgctgtcgaattctgcgtaactctttgtttgccaaggagttttccgtttcgactgcgccggaagtggggcgaattatagacagatataattcgccgtcaacacctaatttcagttttattcggatttgagcgtaatacgcgcaaatgccttcttcccagcctgacaaatgtgggtagcacccagctcgtatataaaggtgcgatccacaacctcaccatctatacgcacaccacccgaccccagaaggtcgcgcgcaactgccgagttcttaaccaggcccgccttattaagcacagcagcaatcggcatcgcctcggcagcagacagctcgatctccggcagatcatcaggcagctcgccatccttcatgcgattacccgcagcacggtgagcgttggccgcagcctcttcaccatggaaccgcgcaacaatctcttccgccagcttaatcttcacgtcacgcggattagcgcctgcctctacatcagcacgcagcgcattgatttcatccatcgaccggaagctcagcaactcgaagtaacgccacatcaaagcatcaggaatcgaaaccagcttgccgtacataacgcccggcgcttcctggataccgacatagttccccagggacttggacatcttcttgacgccatccaacccttccaacaacggcatggtaaggatgcactgggcttcctgcccatatgcacgctggagctcacgccccatcaacaggttgaacttctgatcagtgccgcccagctcaacgtccgcacgcaacgctaccgagtcatagccctggaccaacgggtagaggaactcgtgaatggcgatcggctgattggtggagtagcgcttgtcgaagtcatcacgctcaagcatgcgcgcaacagtgtactgagaggtcaagcgaatgaagtccgccggccccatctgatccatccaagtggagttgaacgccacttcggtcttggccggatcaagaatcttgaatacctgagtcttgtaggtctcggcattatcaagcacctgctcacgggtcagcggcggacgcgtggcgctcttgccgctcggatcaccgatcattccggtgaagtcacctataaggaagatgacctggtgccccaactcctggaactggcgcagcttattaataagcacggtatgccccaggtgcagatccggcgcagtcggatcaaagccagccttaatacgcaggggctgaccacgcttgagcttttcgatcagctcagcttcgaccaacagttcttccgcaccacgttttatcagcgctagctgctcttcaaccgacttcataacagacccgcaaggctcagattcaaaagggaaccaaccatacaagatcagggactaattacaagttttgccctgcgaacggacaccgttcagcaagcccagcgttcgcgagcttgcgccacagatgatttggttatattttatacagttatttcatcttcatcatgtcattcatcttttccatttcatcttcaaagtcaaaattacctatgaccactgaaccgtctaaagcgccgccgctttacccgaagacccacctgctcgccgcaagtggtatcgccgcccttctcagcctggcactcctggtattcccttccagtgacgtagaagccaaacgaacatccctgagccttgacctggaaagtcccgttgaacaactgacacaagatcaagacgcttccgacgcgcaacaagccacaaaccttggcaccgagtcgccgttcgcacagatagaaaacagccccgaagacacccagcaagcagctcaaagcccatctgcgcctgttgccgacacggccaagaacccccagcaccgcgaagtgatcgtggccaagggcgacacactgtcgacactcttcgagaaggtcggcctccccgccgctacagttaatgaagtgcttgccagcgacaaacaagccaagcagttcacccaactcaagcacggccagaagctcgaatttgaattcacccccgatggccaactgaacaacctgcacagcaatgtcagcgacctcgaaagcattactctgacaaagggtgccaaaggctttgccttcaatcgcatcaccaccaaacctgtgatgcgctccgcctacgtacacggcgtgatcaacagctccctgtcacaatccgccgcgcgggcaggcctgtcccacagcatgaccatggacatggccaacgtgttcggctacgacatcgacttcgcccaggacatccgccagggcgacgaattcgacgtaatctacgagcagaaagtcgccaacggcaaagtcgtcggcaccggcaacattctctccgcacgtttcaccaaccgcggcaagacctacaccgccgtgcgctacaccaacaaacaaggcaacagcagctactacaccgccgacggcaacagcatgcgcaaggcctttatccgtacgccggtggacttcgctcgtattagctcgcgtttctccatgggtcgcaagcatccaattctgaacaaaatccgtgcccacaaaggggtcgattacgccgcaccgcgtggcacgccgatcaaggcagccggtgatggtaaagtcctgctggcagggcgtcgtggtggctatggcaatacggtgatcatccagcacggcaatacctaccgtacgctgtatggccacatgcaaggctttgccaagggcgtgcaaaccggcggcaccgtgaaacaaggccaggtgattggctatatcggcactaccgggctgtctaccggcccgcacttgcactatgagttccaggtcaatggcgttcacgtcgacccactgggccagaaactgcccatggccgacccgatcgccaaggctgaacgcgcccgcttcatgcaacagagccagccgttgatggcgcgcatggatcaagagcgctccaccctgctggcttcggcgaagcgttaagtatggcgctctatatcggtgtgatgtccgggaccagccttgatggcctggacatcgccttgatcgagcagtccccggcgatcaagctgatcgccacacactacattcccatgcccgataccctgcgcaccgagctgcttgctctttgcgccagcgggccggatgagatcgcccgctcagccattgcccaacagaactgggtaaatctcgctgctcaaggtatccacgctttactcgaccagcaaaacctcaagccccaggacattcgcgcaattggcagccatggccagaccatccgccatgaacccgcccggggctttaccgtacagatcggcaacccggccttgctcaccgagctcacaggcatcaccgtggtcagcgatttccgtggccgcgacgtcgccgccggcggccagggcgccccattggtccctgcgttccatgaagcactgtttggcgagcacagcggtaaccgtgccgtattgaatgttggaggtttcagcaacctcagtctgattgagaccggcaaacctgtagccggcttcgactgcggcccaggcaatgtcctgctggatgcgtggattcaccagcaacgcggtgaacactttgatcgtaatggccagtgggcggctagcggcaaggtcgagcctgcgctactcaacgccctgctcagcgaccctttcttcgtgactacgggccccaagagcaccggccgcgaagtgttcaatctggagtggctgcaccaacacctgggtcgcttaccaacattcgagcctcaggatgttcaggccaccctgctggaactgaccgccctgaccatcatcgaatccctgcaggccgcccagccccagaccagaacactgctggtgtgtggtggcggtgcccacaacgccacgctgatgaatcgcctggccgccctgctaccgtcaactcaagtcagcagcaccgccgcctacggagtagatcccgactgggtcgaggccatggccttcgcatggctggcccattgctgtctcgaaggtatcgcagccaaccgcccaagtgtcacaggggcacgaggacttagggtactgggcgccatctacccagcgtaaaatctccagacagcaaaacgccgcttggcctatcacagccaagcggcgtttttgcgtccgctgtcgatcagatcgagaacgaagacccgcaaccacaggtggtggtggcattagggttcttgatcacaaaacgcgaaccctccagaccttcctggtaatccacctcggcacctgccaggtattggaaactcatcgggtccacaaccaggctcacgccttcgcgctcaacgatggtgtcatcatcggccacatcttcatcgaaggtaaaaccgtactgaaaccctgaacaaccgccgcccgtaacgaatacgcgcagcttcaagcgatcattaccctcttcatcgaccaggctcttcaccttgtgcgcagcaccgtgggtgaattgcaaagccgtgggggtgaaggattcaacgctcatgctgataatctcccggcgtagcgccgccatatgcgtaatgcccggcattatccgcttctcctagaaaagcggtcaactattgttacggtatatcaatctgcgctgtcgccattaaaaacacaaaaggcccgatcaacgggccttttgcttcgcgactcaacagccttaaggcagcatgcccgcgtgggacagccccaacttctcatccaggccaaacaggatgttcatgttctgcaccgcctgcccggacgcgcccttgaccaggttatcgatcaccgacaacaccacgaccaggtcaccatcttgcgggcggtgcacggcaatccggcacacgttggcaccgcgcacgctgcgggtttccggatggctgccggccggcatcacatcgacgaacggttcgttggcataccgtttttcgaacagcgcctgcaggtcgaccgagcgatcgaccacagtggcgtacaacgtggagtgaatgccgcggatcattggggtcaagtgcggaacgaaggtcaggcccacatccttcccagccgcacgacgcagcccctggcgaatttccggcaagtgacgatgcccctttaccgcataggccttcatgctttccgacgtttcagagtacagcgaaccgaccgcagcaccacggccggcaccgctgacgcccgatttgcagtccgcaatcaagcgcgaagcgtccgccagccccgcttccagcaatggcaggaagcccaactgtgtggcggttggatagcaacctggcaccgcaatcaggcgcgcttgcttgatctgttcacgattcacttccggcaggccgtacaccgcctcttccaacaactccggcgcgccgtgcggctggccgtaccatttggcccactcgtcagcgtcctgcagacggaagtccgccgagaggtcgatgaccttggtacccgcagccaacagttcaccggccaacgcatgggcaaccccgtgcggcgtggcgaagaacaccacatcgcaggcgcccaaggtcttgatgtccggcacgctgaacgccaggccgtcatagtggcctcgcaggttcgggtacatatcggccacggccagcccggcctcggatcgggaggtgatgaccactacctcagcttgcggatgctgagccaacagacgcagcaattcgacaccggtataacccgtgccgccgacgataccgaccttgaccataaacctgccctcaacgaacccactggaaagccgtcgataataggggccgtatcgtcctgcgacaaccgtcaacgtgacgtacgggcgcatgagccactactatctcggctaccgtgaacctgggaataactaaaaatgctttatctatgggtcaaagccttccatatcgtcagcatcgtctgctggtttgccgggctgttctacctgccacgcctgttcgtctatcacgcccaaagcgaggacaccgtcagcaaagagcgtttcagcgtcatggagcgcaagttgtatcgcggcatcatggggccggcgatgatcgccacgctgattttcggtggctggctgatctacctgaaccccagcatctttcattcgggcgggtggattcacgccaagctgaccctcgtcgtactgctcattggctaccaccatatgtgcggcgcgcaggtaaaacgcttcgcacgtggcgaaaacacccgcagccatgtcttttatcgctggttcaatgaagtgcccgttctgatattgctggctatcgtaattttggtcgtggtcaaaccgttctaacttcaattactcggggtacctccaatgtcgctgcccgctctgcttgaacaacgtctgcgcctgcccgtcgtggcggcgccgatgtttctgatttccaacccgcaactggtcctggcgtgctgccgcaatggggtggtcgggagtttcccggcgcttaaccaacgcgaaagcagtggcttcaaggcttggctggaggaaatcgaagcgggcctggcgctgctggacaaccctgcgccctacgccgtcaacctgatcgtgcacaacagcaatccccgcttggaggcagacctggcgatttgcgttgagcataaagtgcccatcgtcattaccagtctgggtgccgtcaaagagttggtggacgcggtgcatagctacggcggcctggtgttccacgatgtcaccacccgccgccatgccgagaaggctgccgaggccggtgtggatggcctgatcgccgtggcggcaggtgccggtggccatgccggcacctggagcccattctcgttgattgccgagatccgccagttcttcgacaaaaccctgctgttggccggctgcctcaaccacgggcacgagattctcgcagcccaactgctcggtgcagacctggcctatttcggcacgcgctttatcggcaccaccgaaagccatgcccctgatgcgtataaagagatgctgctcacatcgcgcgccgccgacatcgtgcacactcccgctgtctccggcgtacccgccagctttatgcgccagagcctggaaaacgccggtttcgacctcgccgccctgcaaggcaaaggtgaagtcaacttcggctccaagctcaagccgttgagcgacgaggctaaggcctggaagactgtatggtctgctggccaaggcgtcggtgagattgatgatttgcccagcgtcgatgaactcgttgcgcgcctggatgccgaataccgcaaggcacgcgaacaggcggcacaactgcgctggccacggtgacccaaccgccaggcctgccgactgaacaggcctgccctacctccctgaacaagtgacaaggaagcccgcatgagcgacaaccgtttcaagattgtgtttgatggagccttgctcccgggtgtcgaaagcaccacggccaaactgaacctggccgagctcttcaagagcgaagtcgaagccatcgagaagctctttaccggccgcccggttgcactcaagcgcgacctgtctcgcccggatgcggaaacctacctcaccgcgctgaaaaacgccggggtcgacgcgcgtatcgaacctgaacaacccgtggccttcagccttgccgagacccacgagacggactccggtccttctggcttcgcgcgaccggcggcgtcaccttatgctccgccccgggcgacggtaggtgatgatttgcccgagtacgcgaccctcaaagtcttcactatccatggccgcatcggccgcctgcgctacctggcatggaccctggtgttgaccctggcgatgctggttgcgggcggcatcatcagcaccgtcagctttgccgtggccaccgcgtcgccgattgcgggcaccatcatcggagtactactgggtctcgcgctgtttgtggcgctggtatgggtcagtgtgcagatcggcgtgcagcgcctgcatgacctgggctggtcgggctggttgtatctcctcaacctggtgccgctggtaaacagtgtcttcccgatcctgttgctggtattgccgggcaatgcgggcgccaaccagtacggcgcgccaccgccacgtaactccaccgcggtaaaagtcctggccacgctgtggttggcgtttattccggtcatgcttgccatcgtggtgaccttgggcatgaacggttacctggaccagctcgaagccaacgtggacagcagctacgaaagcagctccatcacctccgatgaagacgccgaccaagccaccaccgctgaagaagacgaagcgcagagtgctgacgaagcgggcgaacctgtagactctccagaacagtgaagaaacgcccccggcctgtaatgcctttgttacaggcgcggcggcgttgcgatggagaaaggcatgacccgttacgctctgatcaccggcgcctccagcggcatcggcctggccctggccgaagcactggcacgtcgcggccgcagcttgattctggtggcccgccagcgtgatcagttggaaagcattgcaatcgaattgactcaacgctttggcgtcgaggtgctgttccgggcctgcgacctgggcgagccgctgcgcttgtccgggttcctgctggagcttgaagaaggcgaacgtcagatcgacctgctggtgaactgcgccggtatcggcaccagcgggccgttcctggcccaggactggatgaccgaacaggacctcatggaggtcaacatcctggccctgacccgcatgtgccatgcgctcggcaatgccatggcgctgcacggcggcgggcagattctcaatgtggcatctgtcgcggcattccaacccggcccctggatgagtacctactacgccagcaaagcctatgtactgcacttctccgaaggcctgcgggaagaattgaagacctgcggcatcaaggtctcggtcctctgccccggcccgacgcgcaccgcattcttcggcaccgcacaaatggacaccgccaagctcgatcgcagccaacaattgatgagccccgaagaagtagcgctctacaccgtgcgcgccctggataagaacaaagccatcatcattcccggtcgtcgcaaccgctggatcgccttcagcccacgcttcagcccacgctggctgacccgcaagatcgccggcgccatcaacaaggcctattgcccgcgctgactggctgggtacactcaccctgcatactcataatggagaaacagctgtggatactctgttcaccaagatcatcaacagagaaatacccgcggacatcatctacgaagatgaccaggtcctggcgttcaaggacattcatccggcggcacctgtgcatttcctggtcattcccaagaagcacatccccaccctgaatgacctgaccgaagaagacaaagccttggccggccacattctgttcactgcccagcgcctggccgtggaacaaggctgtgaggaaggctttcgggtggtgatgaactgcaacccgaaaggcgggcaaaccgtttatcacatccatatgcatgtgctgggtcagcgccagatgaactggccgccgggctgattcccccccgaacaagggtcgcggcccctggctgcgacccaatgcccttgacgcaacgcaaacgcttgcccctctcttgcggtaaactggccgccgagattcttcccggaggtcagcatgactacccaacgtcactactcgccgattgaccgtctgttgctgcaagccgatatggccatgcgtacgctgctgcccttcagcggccaaccgtatcgcccttcgcctgccatcgtgcagcccgacgcgcagatgagcgagaccgagacccgccacgtcgccggcctgatgcgcatcaaccataccggcgaagtctgcgcccaggcgctgtaccagggccaggcgctgaccgccaagctgccgcaggttcgcgccgccatggaacatgccgccgaggaagaaatcgaccatttggcctggtgcgagcaacgcattcgccaactgggcagccaccccagcgtgttgaacccgctgttttacggtttatcgttcgggatcggcgctgcagccggcctgatcagcgacaaggtcagcctgggctttgtcgcagcaactgaacatcaggtgtgcaaacacttggacgagcatctggaacaactgccggccgaagatgaaaaatcccgggccattcttgaacagatgcgtatcgatgaagaacatcacgcagaaagcgcgctggatgccggtggttttcgctttccggcaccggtgcggtttggcatgagcctattggccaaggtcatgactaaaagcacgtaccgaatctgagcccaaaaaagggcgctatcacagcgccctttctttttgcccgtcgattgagcgatcaacccagttcgatgatttcgtaatcatgggtgatggccaccccggccgcgcccagcatgatcgatgccgagcagtacttctcggccgacagttcgatagcgcgcttcacctgcgcctctttcagcgcccgccccttcaccacgaaatgcatatggatcttggtgaataccttcggatcttcagtggcacgctcggcctccaggaaagcttcgcagctctccacagcctggcgtgacttcttcaggatgctgaccacgtcgaaattgctgcaaccgcctacgccaagcaggagcatttccatcgggcgaacgcccaggttgcggccaccggcttccggcgggccgtccatgaccaccacatgaccactgcccgactcaccgaggaacatggcttcgcccgcccattggatgcgtgccttcatcgcccagactccactgtaaaaaaagggtcgccagcttagcacagcgcctccgtgcctcagcgtttcgcacaaaagcgatcaatagcagggtttgcacggaaaattggttaatcgagtcagaatgtgtctgttaagctgacgccaaatcgatggcgtaatgccaccctttatacggcgtgtatcaatgccgataccgatgaatacaacaactccaactatttcgcgcagtcttttcgggatacaaccatggttgcccttactcccatacccaagatcaagaatctcgacaaactgctgatgcattgccagcgccgccgctacccggccaagcacaacatcatctgcgccggcgaacgttccgaaacgctgttcttcattatcaaaggttcggtcaccatcctgatcgaagatgaagacggtcgcgaaatgatcatcgcctacctgaacaccggggatttttttggggaactggggctgttcgaacaagccggcaaagagcaggaacgcagcgcatgggtgcgcgccaaggtcgagtgcgaagtggccgagatcagctacgccaagttccgcgaactggcccagcacgacccggacatcctttacgtcctcagcggccagattgcgcaacgcctgcgcgataccacgcgcaaagtcggcgacctggcattcttcgacgtcaccggtcgcgttgcccgctgcctgcttgacctgtgcaagcaacccgacgccatgacgcaccccgatggcatgcagatcaaggtcacgcgccaggaaatcgggcgcattgtcggctgttcacgggagatggtcgggcgcgtactcaaggacctggaagaacgcaacctggtgcacgtcaaaggcaagacgatggtggtattcggtacccgttaagccggcaggaagctggccaacatctgacggtacaacgtgtcgagccggctgatcgcatccggcgccgggaaggcttcgtgcagggcgatatggctctcggcacgcacccgctggtcgagaccgcaggcttgattgaagcggttgaccgccgcgatcagttcttcacgatcgttttccagcaacagtgcaccgtgcaccaggcccaccgggcgccccccgctttgacgccagcgctgggcagtgccaaccattttgcgaccattgagattgacgttgtagcgaccgtcgcaaaatgcgccgtcgatctcgccgacagacgctttgccacccaactcgatcagcaagtcgcagatcggttggcataaacgcaagtaaccggtttcgatacgattctggtcgccttcactgcgcggcggggcgtagaccagggcaatgttgaccgtggcgctcgactgcggcaccggctcaccgccggtttcacgcagcagcaccggccaaccggcgtcggcggagacttggctggcagtttcaaaggccggcaagcggctcaaccgacgtggcataaccaaagcctggttgctgggttgccagaacaacaacccatactcccgctcacctgcgcaaacagcagccagcaggtcctgctcggcggcaagtccggcttcgacggtcatcgcaaccggctgcgtcatcatcaatccagcgtcgaaccgctgaccgccacgccccgctccgggaagaacaggcgctgcaattcagcccccgggttctcggcacgcatgaacgtctcgcccaccaggaacgagtaaacgccgctgatctccatcaactcaacatcggcgcggttgacgatgccgctctcggtgatcaccaggcggtcacgcggaatgcgcggcagcaggtcgagggtgttttccaggctgacttcgaaggtgtgcaagttgcggttgttgacccccaccagcggtgtgtcgagggttttcagggcgcgttccagctcatcaccgtcgtgcacttccaccagcacgtcgaggccgacgcttttggcgacggcagccagctcggccatcttcacgtcatccagcgcggaaacgatcagcagcacgcagtcggcgcccagggcacgggcttcgacgatctggtacgggtcgaccatgaaatccttgcggatcaccggcaacttgcacgcggcgcgagcctgctgcaggaacaggtcggaaccctggaagtagtcgatatcggtcaacacggacaggcaagtcgccccccccttctcatagctgacggcgatttccgatggcacaaagtgttcgcggatcacgcctttgctcggcgaggctttcttgacctcggcgatcacggccggttgcttctgcttggcctgggcgatcaacgcattggcgaagccgcgcggtgcatcggcgatctttgcctgggcttccaactcggccaggctcacgcgggcacgccgctcggcgacttcttcagccttgcgggccaggatcttttccagaacggtcggcacactcatccttcattctccatcttgaatactgcggtgaatgctcccagctcttcgagcttctcacgagccagaccggtgtgcagcgcatcgtgggccaaagcaacaccttccttaagactataggcgtggtcggctgcataaagtgccgcgccagcattcaaaacaatcatctcggcggctttctgaccgttctcggtcttgcgacggcccagtgcatcacgaatcagttccagcgaagccgccgggctttccaccgccaggccgtgcaggctctgactcttcatgcccaagtcttccggttcgacccagtattcggtgacctggtcattcttcagttccgccacgaaggtcggcgctgccaggctgaattcgtccaggccatccttggagtgcaccaccagcacatgcttgctgcccaggcgttgcagcacttcggccagtgggcggcacaacgcctggctgaacacgcccaccacctggtgtttcacaccggccggattcgtaagcgggccgagcatgttgaacagggtacgcaggccgaggtccttgcgcgggccggcggcgtgcttcatcgcaccatgatgggattgggcaaacatgaagccaatgccgacgctgtcaatacagcgcgccacttgtaccggagtcaggttcaggtagatgcccgccgcttccagcaggtcggcactgccgctcttgccggagaccgcgcggttaccgtgtttggccacggtgcagcccgccgccgcgacgacaaaagaagacgccgtcgacacgttgaagatgttcgcaccgtcaccgccggtgccgaccacgtcgaccacaccgtcgagggtcttgagttcgaccttgtcagccaactcgcgcatcaccgacacggcgccgacgatctcgtcgatgctctcgctcttcatgcgcatggccatcatgaacgcgccgatctgcgcgtcggtgcattgaccggtcatgatctcgcgcatcacatcgctcatttcagcggtgctcaggtccaggtggccgacgatacggctcagggcagtcttgatatccatggaaagtccttagcgcgtgccgccgctctgcttgagaaaattggcgaacagctcgtagccctgctcggtcaggatcgattcggggtggaattgcaccccttcgatattcagtgtcttgtggcgcaggcccatgatctcgtcgaccgagccgtcctccagttgggtccaggcggtcagttccagacaatccggaagggtttcgcgcttgaccaccaacgaatggtagcgggtcacggtcaccggcaagttaagcccatggaacacgccctgatcatgatggaataccgggctggtcttgccgtgcatcacctgccgtgcacgcaccacgtcaccgccaaaggcctggccgatggactggtggcccaggcatacgcccaggatcggcagcttgccggcgaaatactggatcgcttccagggaaatacccgcctcggtcggcgtgcacgggcctggcgaaaccacgatgcgctccgggttcagggcagcgatctcggccacggtcaattcgtcgttgcgcaccaccttgacctctgcacccagctcgcccaggtactgcacaacgttgtaggtaaaggagtcgtagttatcaatcatcagcaacatgggggaaacctcaggaattgggggtctgttcagccagcgcaacggcgcggaacatcgcgcggcgcttgttcagggtttcttcccattcgagggccggcaccgagtcggcgacaatcccgccaccggcctgcacgtgcaactccccgtccttgatcacggccgtgcggatcgcaatggccgtgtccatgttgccgttccaggcgaaataacccacggcgccgccgtagacgccgcgcttgaccggctccagctcgtcgatgatttccatcgcgcggatcttcggcgcacccgacaaggtgcccgccggcagaatcgcgcgcaacgcatccatcgccgtcaggccagccttcagctcgccggtaacgttggagacgatatgcatcacgttggaataacgctcgatcaccatcttctcggtgagcttcaccgagccgatttccgagacccgcccggtgtcgttacgccccaggtcgatgagcatcaggtgctcggcgatttccttgtcgtcgctcaacaggtcttcttccagcgccaaatcggcttcttcggtcgcaccccgtgggcgcgtaccggcgatcgggcgcacggtgatcaggttgtcttcgacgcgcaccagcacttccggcgaactgcccaccacgtggaagtcaccaaagttgaagaagtacatgtacggcgtggggttgaagcagcgcaatgcgcgatagagatcgatcggcgcggccttgaagtcgatggacatgcgttgcgacggcaccacctgcatgcagtcaccggcaaggatgtattccttgatggtatcgaccgcacgttcgtagtcatcctgggtaaagctggagcggaacaccgggtcggccgccggcggacgactgaggtccaggccgcgacgcggagtgatcggctgacgcagtttttccagcagggcttcgaggctggcccggccttgctcgaacgcatcggcctgggacgggtcggccagcacgattgcgtgcatttttccggcgaggttgtcgaacaccaccaccgcgtcggagaccatcagcaggatgtccggcacgcccagcgggtccggattcgggcacttgcccaaacgtttttccacataacgcacgcagtcataaccgaagtaacccaccaggccgccgttgaagcgcggcaggcccgcgatggtcggcacgttgtagcgcgccttgaaggcttcgacgaacgccaacgggtcttcgacatcatggctttcgatctcgacgccatcatgggtaatgctcacatgatggtcatgtacccgcagcaccgtgcggcacggcaggccgatgatcgagtaacgcccccacttctcgccgccctgtaccgactcgagcaggtaggagttaggctcatcggccagtttcaggtagatcgatagcggcgtgtcgaagtcggccagggtttcgcaggccaggggaatgcggttgtagccggcagcggccaaacgcaggaattcttcgcgggtcatgatatgcctcgtggcttgagggtctaacagtcaggtatgcaaacgtgccgcagagcgcggccaggatcagtcaggcgcgccaacgccagcgggccagggccttgataactttcatccagagtttgcgagtgaccaccacgatggaatttccagaaggggacggatcggtatcgggcaacgttatctcagcgcccgctcccaagcaaccggggattaacaggcgcaggtcatcaatcaccaatgaaggcgactcttcggcgatcggccgaccatggttatagccgtagctgagggccacacactgcacgcctgcggccttcgccgcctgcacatcactgcgtgaatcgccgacaaacaacgactgcgaagccgggatattggccattttcatcacgaaaaacagcgccgccggatcgggctttttctgcggaagggtatcgccgccgatgatccagcggaaataccggccgattttcatctggtccagcagcggcgctacgaagcgttccggcttgttggtgatcagggccatttccacgccctgcttgctcagccatttgagggtgtcacgtacgccggggtaaaccacggtcagttcgtggccgtcttcataggcggcattgaacagttccagcgcatgctcggcctccacatcatcgacaccttcggcatcgatgttgttagccaaggcgcggcgcacaagcatgtgcacgccgttgccgacccactcacgcaccgactcgatcccggctggcttgcgccccagcttgagcagcatctcgtccaccgccgccgccaggtcgggcaccgagtcgatcaaggtaccgtccagatcgaacatcaccagccgtggcagtttgccggggaacagccgctcaaagccgctcatggacgcgccagcgccagttcggcacgcatcttgtcgatgacttcctggtagtccggcgcattgaagatcgccgagccggccacgaaggtgtcggcaccggccgctgcgatttcacggatattgttgacgttgactccgccgtcgatctccaggcggatatcacggccggaagcatcgatcagcgcgcgggcttcgcgcagcttgttcagggtgccggggatgaacttctgcccgccgaagcctgggttgacgctcatcagcaggatcatgtcgaccttgtccatcacgtactcaagcacgctcagcggcgtggccgggttgaacaccaggcccgccttgcagccgccttcgcggatcagttgcagggtgcggtcgacgtgcagcgaggcttccgggtggaaggtgatgtaggtcgcgccggcttccacgaagtcgccaatgatgcgatctaccgggctgaccatcaggtgcgcatcgatcggcgcggtgatgccgtacttgcgcagcgccgcacacaccatcgggccgatggtcaggttgggcacgtagtggttgtccatgacgtcgaagtgcacgaagtcggcaccggcggccaacaccttgtccacttcctcacccaggcgggcgaaatcggcggagagaatcgatggagcaataacgaagggctgcatgacgcaccttttttgagctaaatcacgatggcgcgcattgtatacctcatgctttgccgcgcgcaccgtgacctggctcaacggctagtaagccgcccggtagattttctcgatatcggcggcgctgagcttgcgcggattgttgcgcatcagccgctcaatgcctgccgcctcaaccgccatggccgggatcgcgtcctcgggcacgccgaaactgcgcaggcctgccgggatctcgacggcggcacacagtcgcgtcatcgcgtccacggcctggtcggccgcgtcgttgacgctcaagccgctgacattcacacccatggcctgggcgatatcctgcatgcgttcgacacaagccagtttgttccagtgcatcacatagggcagcagcagcgcattactcacgccgtgggcgatattgaaacgcccgccgagggggtacgccaacgcatgcaccgcaccgaccccggcgttaccgaacgccatgccggccatcaggctggcggtggccatgtcgtcacgggcctgcaggttggccgggttggcgtaggccttgggcagcgccttggcaatcagtttgatcgcgccgatggccagcgcatccgtgatcggcgaggcattcagtgacaggtaggattcgatggcatgcaccagcgcatccacgccactggcggcagtaacgctgcgcgggcaggtcagggtcatttgcgggctgatcagcgccacatccggcagcaggtagtcgctgacgatgccttttttaagctgtgcggccttgtcggagaggatcgccacattggtcacctccgaacccgtgccggccgtggtcgggatggcgatcaacggcgggcccttgcgcggcacctggtcgacgccaaagaggtccgccagcgcaccgtggtaaccggcgtaggcggcaacacttttggcgatatcgatggcgctgccaccgcccacgccgatcaggccgtcatgtccgccttcgcggtaagcgcgcatgcaatcttcgacgatggcgatttccgggtcgggcagtacgcggtcgaaaatctcgtaggcacgttcgcccaggtgttcgagggccagcgccacggtgccggatttgaccagcgcggcgtcggtgacgatcagcgggttgtccacatccaggcgggtgagctcaaaggccagttgttcgatggcgccagcgccggtgagcagtttgtgggcgatcttgaatgaggaagtactcatgtgcgcggcctcttattaagaaatgggctggcacaagagtagctcggaaacttgggttgcctagcattcagaggctgaatggtgatttccaacacgacacaaaaccatgtgggagggggcttgccccctcccacacttgaatctccagcaggccgttagactgccgcggtgcgcagtttctcgctacgcccgcgcaaccattccagagtcagcagcagcaacaccgagaaggcaatcaacaaggttgccgccgccgcaatcgtcgggctgaggttctcacggataccactgaacatctggcgcggcaaagtcgcttgctcagggccggcgaggaacagcgtcaccaccacttcatcgaacgacgtggcgaaggcaaacagcgcgccggagatcacccccggcgcgatcaacggcaaggtcacccggcggaatgccgtgagtggcgaagccccgagactggcggccgcccgcaccaggttgtggttgaacccctgcaacgtggccgacaccgtgatgatcacaaacggtacgcccagcaccgcatgcaccacgatcaacgagaagaagctgttgcccaggcccaacggtgcaaagaacaggtagctggccacaccgataatcaccaccggcaccaccatcggtgaaatcaccagcgccatcaccagcgccttgccggggaagttgccgcgtgtcaggccgatggccgccagggtgccgaacaccatcgccaacaccgtggccgccggggcaacgatgatgctgttcttcagcgcccgcatccactcggcggaggcaaagaagtcctgataccagtgcagtgaaaaaccctgcaacggatacaccaggaaactgccgctgttgaaggacaacgggatgatcaccagcaccggcaggatcaagaacaacaggatcaagccgcagaggatccgcaagctgtagaaccagacccgttcaacgggcgacatgtaagggctcagcatcgcaaggtctcctcagctcaggcgcaggcgactggcgcccaccagccggttgtagatcaggtacagcaccacggtggccagcagcagcaagccgcccagcgccgtcgccatgccccagttgatactggtgttggtgtagaacgccacgaagtagctgaccatctggtcgttcgggctgcccagcagggccggggtgatgtagtaaccaatcgccaggatgaacaccagcaggcaaccggcgcctacaccggcgtaggtctgcgggaagtacacgcgccagaagctggtgaatgggtggcaacccagggaaatagccgcacgcatgtaggtgggcgagatgcccttcatcacgctgtagatcggcaggatcatgaacggcaacagaatatgcaccatcgagatgtagaccccggtgcggttgaacaccagttccaagggtttatcgatcaggcccatgcccatcaaggcgctgttgatcaggccgccggactgcagcaacacgatccacgccgctacccgtaccaggatcgaggtccagaacggcagcagcacgaggatcatcagcaagttgctcttgcgcgccggcaggttggccagcaggtacgccaagggataggccagcagcaggcagatggccgtaatcaccaggcccatccagaaggtacgggcgaagatgtccaggtagatcgcctggtccggcgtggccggggcgacttcgccaaggtcgtcgatgcgatggtcgacggccgccagcaggtagaacggcgtcagactgctggtgttgcgccggatcgcctgccagtacgccgggtcgccccagcgttcatcgaggttttccaacgcttctttataagagccgggcgcttcactgaacggcagcgcccgcgcggttttggtcagcaggctgcggtagccggccagttccatgttcaagcgcttggacagatcgcccagggtctggttcttgcgcgcctcgcccagatcctcgctgagggcctggtacaccggttcacccggcaagccacggccgtcccaggccgtcaccgcgaccacggtacgcggcaagccacccaccacttccgggttgccgacgctcttgaacagcaacgcaatgatcggcaccaggaacaccagcagcaagaacagcaccagcggcgcaatcaaggcctgggccttccagcgattgagccgctcggcacgcgccaggcgctgcttgagggtggggctgttgacctcgttcgagggaacggcgatggccatggctgactccgaatcttaaagataaatacagatcccctgtgggagggggcttgcccccgatggcggtgtatcagttgataggtaggctgactgacactccgctatcgggggcaagccccctcccacatgggttacttggccgcccaggcgttgaagcgctgctccagctgctcgccgttatctgcccagaagctcacatcgatctgcacctggttggcgatgttttccggggtggtcggcatgtccttgagaatgtccttggccagcaacggcacggcttgggtgttggccgggccgtaggcgatgttttccgagtaggtcttctgttgctgaggctgtaccgagaaggcgatgaatttcttcgccgcttcggcacggtccttggccaggccttttgggatggcccaggcgtcgaagtcgtagatgccgccgttccacaccactttgaggttgctttctttctgcacggcggcgatgcggccgttgtaggccgagctcatcacgacgtcaccggaagcgaggtactgcggcggctgtgcgccggcttcccaccactggatcgacggcttgagttcatcgagtttcttgaatgcacggtcctggccatctttgccggccaacactttgtacacgtctttcggcgcaacgccgtcggccatcaaggcgaattccagggtgtacttggcacctttacgcaggccgcgtttgcctgggaatttcttggtatcccagaaatccgcccaactggtgggcgcagaagtaagtttgtcggcgttgtaggccagcacggtcgaccacacgaagaagcccacgccgcaaggctggatcgcgcctttcacgtagtcagcggtgctgccgaacagtttcgggtccagcggctcgaacatgtcttcgtcgcagccacgggacagttccggcgattccacttccaccaggtcccaggacacgctcttggtgtcgaccatggctttcaccttggccatttcaccgttgtactcgccggcgacgatcttgccattgcccgctctttcccacggcgcgtagaacgccttgacctgggccgccttgttcgcgccaccgaaggacacgaccgtcaggtccgggccggccatggcctgggttgcgccgatcaagccaatggccagcgccgaatacttaagggatctcaacattgttgttctctccacgtgcagggttggtgaagccagggggcgatcaattcgcctctagaagtgggtcgagtgcgcgaacgtgctcgacttgccagccaatcggtaccacgtcgccgaccgccagggctgggtccagctcggcaatcggttgtttcacaaaaaaatcggtcttgccgcagacttccaggcgcacgcgcacgtggtcgcccaggtagatgaattccgccacccgccccgagaaacggttgacgcagctttcgctggaaccattgaggctgacgcgctccgggcgcaccgagagggtcaccgggccgccgacctggccgacgttcaccgccagcgcctcgaccttctcgccccgcgccagctccaccacgcagcgctcgccggtgtggctgtgcaggcgaccattgaggcggttgttctcaccgatgaagttggcgacgaaggtgttcttcggttcttcgtacaaggtgcgcggcgcggcgatctgttggatctcgccctggtggaacaccgccacgcggtcggacatggtcagcgcttcgccctggtcatgggtcacgtacaccacagtcacgccgaggcgctggtgcaggtgcttgatctccatctgcatgtgttcgcgcagttgcttgtcgagggcgccgaggggttcgtccatcagcaccaattgcggttcgaacaccagcgcgcgggccagggccacgcgctgctgctggccgccagagagttgcgccgggtagcgctgggcgaaggcatcgagctggaccatgctcaacacgcgtttgacccgctcgctgatgtcggtcttgctcaagccccgcaccgacagcgggaacgccaggttctcggcgacggtcatgtgcgggaacaaggcgtagttctggaacaccatgccgatgtcacgcttgtgcggcggcacgttgttgatggaccgcccggccagctggatttcccctgcggtcggcgtctcgaagccggcgagcatcatcaggctggtggtcttgcccgaaccggaaggcccgagcagggtgaggaactcgcccttgcgaatctccaggttgaggtctttgacgatcaggttctcgccgtcgtagctcttctgcacgccacgaaagctgaccagcacatcatttgaatccacctcgctcatacccgcacctttttgttttggactgctgtggaacaagcgtagtccaggcgcgagaccccggaaatcgggggccaggagagaattgcatcagccggatggaaggttgggggtagggattgccctacagggatggcgcgcacggaacggtgccgcgccaaggggtgagcggcaagcggcaagaatgggctccgcgggtttttcgcggtgtcgttatcaggtatgtggttagagcagcttgtgttccatggcgtacttcaccaactcggccagcgaggtgatattgagcttttgcatcaagcgcgccttgtgggtgctgatggtcttgctgctcagcgccagctgctgggcgatgtcgttgacgttggcgccctgggccaagcgctcgaacaccgagaactcacgctccgagagcaatgaatgcagcggtcgcgtatcggtcaggccgacctcgaagaccatgcggtcggccaggtccgggtcgatatagcgcccgccagccgccaccttgcggatcgccgtaagcaacagcgccgggtcactgtccttggtggcgtacccggcggcgccaaccttcaaggcgcgggcggccatttgcgcttcgtcgtgcatcgacaacaccaggatggccggcggattgttcagcgcacggatgcgcgcaatcgcttccaggccattgacgccgggcatcgagatgtccagcaacaccacctcgcaaggcacgtgacgcaaggtctccagcaactgctcgccattgccggcctcacccaccaccagcaggtccttggccaggccgatcaactgcttgatgccttcacgaacaatggtgtggtcttcggctaccagtacacggatcacagggctttcctctgggtgttatgcatccaacggcaccgtgacgctcagggtggtgccctcccccaactcgctgtccaggcttaattgcccgcccatgatcagcacccgctcgcgcatgcctaccaggccgaacgataccggacggccctgggcctggacgaaaccgacgccgtcatcactgatggtcagccgcagatgcgtgccttccactgccaaggtcagttcgacagtatgcgcctgggcatggcgcatcacattggtcagcgcctcctgcaggatacggaacaggccgatggccttggcatcgctaagggtcggaagattatccggcacctggaccaggcaggggatttgcgtgcgcgcttcaaaacgtcgcgcctgccattcgatggccgaggcaatgccggcatccaggatcggcgggcgcagcgccgtcgccacatcgcgtaccaattgaaataactgggcgatcaggcgcttcatgctgttcaagcgctcgtgcaaaccggggtcgagttgcgcataggccagctcgcacatcgaggtttcgagcttgagcactgtgagcatctgcccgagttcgtcgtgcacttcacgggcgatacgggccttttcttcttcgcgcacggtttccaggtgcgcggagagttcgcgcagttgcgcttcactttgcagcaacgcggccaacgtccggcgcaactcggtgacgtcgttgaggtagaccaccaggtattcggcttcggcaaaccgcagaaaactcaaggacacgttggtcggcaggatgctgccatcggcacgccggcaatcggtggcaaagttctgcgggccgtcttcgctggcccgcgcgcgtttccacaggttgagccagcggtccatgtccaggctcggatccaggtcagccaagggccgctcgatcagtgcaccggggccgtagcccagcatgctttcagcggcacgattggcgtagcgcacatgactgtcccagttgacccacaagatgcccacggtgctctgatcaatggaaaactgcgtcagccgcaaggcttcggccccggcggcgcgggcggcgctttcttcgcgggcggccagcagatcatgttcgagcacccgttgctggcggcgctgccagaacacgacagccaggctggcaagcaaaaacaggcccagcaacaggctgaggttttgccacaggcccggggtttccgtcaggcgtgggtacttgggttgcagccagcggctatgcaattggtccaggtcgcgggcggggatagcgcgcaaagcgctttccatgatgccggccagctccggccattcccggcgcgtggccacccgcagcaactgtggcaggccgatatcccccaccaccgccagcccggcgaattccgcctcgccggacaagcgactcaattgcgcctcatccaccaccgcgtagcgcgcctgctggctcaccagtaactgcaaggcctggcgctccatcggcacaccttgcaggttgaggccggggtaggtactgcgcaggtagtccgccacggcgctgggcatgcgcacggcaacgcgggattgctcatcgagtttctccaactccaccgcaccaccgccctcgcggataccgacaatgtgctgcggcacacgcatataagggtcggtgaacaaccataggcgtaaaccggccggggtttgttgcaggccgggggcgatgtccacttcgccctcgcgcacggcggcttccagttgctcctggttggggaagttgcgccaggtcagctcgatgttcagtgccttggccaaccactgcatcaactccacgttcgccccggacagccgttgcaaacgccggtcgtattgcgcgtagggcgcctgcaacaccaggcccacccgcagctcggggtgctgggccagccactcgcgttgctgcgcattgagctgcgcctggggcgtggcgggcacagtggcggcattggccatcaaggcaaggcaccaacagccgataaccagcagacagcgaaaacccatgattgacgtctcacatcactgacaaatactgaccaacccattaggctgccggaatcacttctggccgggaatttacgatgccctttgttcaccgttcggcactgccagcattgtgcctgtcgttacttattaccagtgccttttccgtacaggccgctgacgcccccgcacctgccgccgaaaaaccggtcgaacgccagcctttgctcgagcgtagccaggaggaggccagcgccctggagcgcaaaataccgcaacaggaacagcaacaattgcaggccggcagcgattcattcctcgccctgtggaaaccggccaacagcgccgagcccgagggtgtggtgattatcgtaccgggcgccggcgaaagtgctgactggccgcaagcaatcagcccgttgcggcacaaattgccggatgccgattggggcaccctcagcctgtcgctgccggatgtgagcgcggacaccctgccaccgcgcgtgatggaagcgcccaaggctactgtcgacaccagcagcaaagaggcaagtaccgccgacaaacctatcgaacaagccgccagcgccgaagccgaaggcaccgacccggccgtggtacctggggccgatgaacaggacaagaccgacgcttcgcgcatcttcgcgcgcatcgacgcggccgtggccttcgcccagacccagagcgcacgcagcgtggtgctgctcggccatggcaccggcgcctggtgggctgctcgctatttgagcgagaaacaaccgtcccaggtgcagaagttcgtcatggttgcggcgcagacgcccaccgggcgccatccggatgtgcaacaactggcccccggcctgaagttgccgaccgccgatgtcttctatcaagacagcgctcaatcacgcaaaaacgccgtggcccgcgcccaggcggccaagcgtttgaagaatgacggttacaagcaggtgtcgttgaaagccttgcccggcaacagtgatgccgggcaggagcagttgtatcgcagggttcgcggctggttgagcccgcaggccagcgtcgactgaaacctagcggaaatctcggcgctcgcgaatcaacgtataggcgttgtgcaattcacgggtacgctcggtcgcctcacgcacctgcgcggggctggcacccgtgccagcaatcttgtccgggtgatggcgactgagcagcctgcgataagcctgcttgattcccgatggctcggtggtggccgtcactcccagcaagcgcaacgcctcctgataagtgacgccgcgactgaccaatggccggtgctcaggcttgaagtcagcggccaatgcctggagctgttgtggcgtccagcccagccatttgccccacaggtcgatcaggtcgcgctcggcgtcatccgccttgccatcggcccacgccatacgccagcacgcgcgcaagacaccttcggcggcatggggctgcgccttgagcacacgcaagtagctgcgcacccggtcagcgccggacttgccgcgattgaacgccgcaatcgcacggcgctgggccgactcggtcatgtccagcgcacgcatctcctggcgcgcctgttggatatgcccatccaccacgcgtccattgctcttggccagacgccccagcaacacaaacaacaactcgtcgttgcgcaacgctgggcgcccacccaggcgctcgcgcaattgcgcccagctgtgcagttgcaggcggcggtccagcgcctgccccaacagtgcacccaacatggcccccggaatactggcaatggcaaagccagcccccgcgccgatcagcgtccctggccacagcatgctactgccccgctgtcagcagggtttcgacctgcgccaggcgctccagcgtgccgacatcaatccagcgtcccgccatgtgttcccccgttaccagacctttggccatggcggtccgcaacagcggcgccagcttgaaggcacccgcgctgcacccctcgaacagcttggggtcgagcacggaaatgccactgaaggtcaggttatcggcaccggccgccgcatcatgaagcaaaccctgatccaggtagaaatcgccacccgaggggtgatgcgccgggttatcgaccatcaccagatgggccaggcccttgagcggttgcttgagccgggtgaagtcgtaatcggtccagatgtcgccattgaccaccaggaaaggttcgtcccccagcaatggcagcgcctggaaaatcccaccgccggtttccaacggttcgccttcggcggagtaacggatgcgcacgccaaactgcgcaccatcccccaggtaactctcgatctgttggccgagccaggcatggttgatcacgatatccgtgaagccggccttggccagcgcctccaggtgatactcgatcaggcgtttgccgccggcctgcaccagcggcttgggcgtatgcaaggtgagcggacgcatccgctcgcctttgccggccgccaggatcatcgccctcatacgcttgcctcggcgggctggcgcaggctggcgagcaattcacccagttcgctcagctccgggcggtcggccagcaccgcttctatataggcaaagaagcgcggcacatcggccaggtaacgtggcttgccgtcgcgatggcagatgcgcgcgaagatgccgataaccttaaggtggcgctgcacacccatcaggtcgctggcgcgcaggaagtcttcgaagtccgcctgcaccgggatgcccagtttcgcggcacgctcccaatagccgcgctgccagtcccgcacgcgggccttgggccaactgaggaacgcgtccttgaacaggcaggtgatgtcataggtgaccggcccgtagaccgcatcctggaaatccagcacgccggggttcggctcgctgatcatcaggttgcgcggcatgtagtcgcggtgcaccagcactttcggctgcgccagggcgctgtcgatcaggtggtcactgacgcgctgccaaagcgcctgttgctgtgtatccaactcgatacccagatgccggcgtacgtaccactcgggaaacaattccagctcgcggcgcagcagggcgacgtcataactgggcagcggcgcatccatcggcagctgctggaaagccagcaaggcgtcgatggcatcggcaaacaagtgatcggcatttttgtcgtcaatcacgtccaggtaggtcttttggcccaggtcattgagcaaaagaaagcctcgcggcaaatcttctgcataaatttttggaacatttatgcccgacttcgccagcaaatgagcgatatcgacgaaaggtttgcagttttcctgggggggtggagcgtccattacgacaaaggtccggccccccccttcccagcggaagtagcgcctgaaactcgcgtcgctgctggccgcggtcaatgtggccggggggacggcgccccagccttgagtgttgaaaaggatcggcaactgctcatccagccaggcttccagctgttgtaaacgtagatcttgctcgggcattacaagggtctccgacggcgctagccgtcaagcggggcatgctttattatcacgcatctttttcagaccatcgagaggcgtgcggcccaaaccgcgggcagatggcacgcaggaagcccggactaataagatggcattgaaatcccccgcgtttcgtagaaaatttccgttgctggtaaccggcagtctgctggccctgcaacccttcgccacctcattcgtggtcgccgcggaacagtatgactgctcagtctctgcttcgggtgcctgggattgcgcgccaaaaaccgccgcagccccactaccaccacgcccggtgcatgacggtgcagccgtcagctccgccaacagcacggcgcaggccgatgctggcggcaacgccgaggccgagcccaagaccgctctggtcaccgaagccaagggccgtggcctgcgttcgcgcagcgccgactacagccacctggactgggtgccacgcgacaagctgaccgcagcacagttggctgaaaccggcccttactgcggcggtgcgtacattgagccgactcgccctggcatgaacgacaagacgaacaagagcgatgcgcccaccttcatcggtgccaaggcctctcgttacgagcaggaacaacaggttgcaaccctggccggtgacgtcgtcatgcgccagggcagcatgcagctggaatccgaggaagccagcctgtaccaggccgagaaccgtggcgagctgaacggcaaggtccgtctgcgcgacaacggtgcactgatcgtgggcgaccatgccgaagtgcaactcgacaccggcgcggcgcagatcgataacgccgaatacgtgctgcacaagtcgcgtatccgcggcagcgcgctgtacgccaagcgtgccgagaacgcgatcatccgtctcaaggacggcacatacaccacctgtgagccggacagcaacgcctggcagctcaagggcaacaacatcacgttgaacccggccaccggtttcggtacggccaccaacgcgacgttgcggatcaagaacattccgatcctgtacaccccctacatctatttcccgatcgacgaccgtcgtcaatccggcttcctgccgccgagcttcagcaccggcagcgaaaccggcttcaccctggtcacgccgtactacttcaacctggcgcccaactacgacgccacgttgtacccgcaatacatgaccaagcgcggcttgttgatggaaggcgaattccgctacctcaccaaatccagcgaaggccagttcggcggcgcgtacctgaacgatgacaacaacgagcgcagcaagcagaccgattacgaaaaaacccgctacatgctcaactggcagcacaagggcgggctggattcgcgcgtactgacccaggtcgactacacacggatcagcgatccttactacttccaggatctgaaatcgttccaggaaggcgttgaaagccgggatgctctcaaccagcagggttccgtgacctaccggggcgactcttaccaggcgcgcctgaacgtccaggcctaccagctggcgacgatctcccagatcacgccgtatgaccggttgccgcaaatcaccttcaatggtgccttgccgtaccatccgggcgggctgaacttcacctatgagactgaagctgttcgctttgaacgcagccttgaaaaaggcacgtttaccgatcagaacgggcttgtgtcgcctcgcctggacacctatgtcaccggcctgacccgcgccaacggcacacgcttgaacgttgcgccagccgtcgaatacccgatgaactggacctacggttttgtcacgccgaagctcaagtacgtctacaccaagtacgatcttgacctcgacagcatcggcaagaaccagatcatcgcccagcaagcggcggccactgcggccaacccgtacgccggtggcaacttcaagagctcgcaagaccgcgcggtaccaatcgccagcgtcgacagcggcctgtatttcgaccgcaacaccaactggttcggcaaagactatcgccagacccttgagccgcgtgcgttctacctgtacgtaccgaacaaggaccaggctgacatcccggtcttcgacaccagcgagtactcgttcagctacgcctcgctgttccgtgacaaccgcttcagcggctccgaccggatcggcgacgagaacaaactgtccctgggcttgaccagccgctggatcgaagacaatggcttcgagcgtcaacgcgtgtccgtgggccaggcggtttacttcaaggatcgtgaagtgcaactgccaggtatcctggccgccgaccgtgccgacgcacgttccgatgtttcgccaatcgccctggactacgagttccgcttcaaccgtgactggcgcgccactgccgactacaactgggacaccgaggagcacagccctcgttccggtagcgcaatgctgcactaccagccggaagacaacccgaacaagatcatcaacgtcggttatcgctatcgcaacgaccaggtcgtctacaaccagctgaccggcaaatggcagttcggtggtgactacgggcagccaggtgatccgaacttcgtgaaggattactacaagatccagcaacacgacttctcgatgatgtggccgatcattccacaatggaacctgatcacccgctggcagtatgactacgcccgcaaccgtaccctggaagccttcggtggtttcgagtacgacaactgctgctggaaactgcgcgtcatcaaccgttactgggtttccaacgacgaatacagccagatcgccccgcttaacgaaaagggtgaccacgggctcttcttccagatcgtcctcaaaggactcggcggcctgaccggcgccaaggtagagagcttcctcgacaaaggcattgaaggttatcgtgaacgtgaagaccaagctttctgattgtctgcgcccgctagtgctgggcgcgctgttcctgggtaccgcttcggcgcacgctgcagttcagcaactggataaggtcgtggccatcgtcgataacgatgtgatcatgcagagccaactggaccagcgcgtcaaggaagtccagcaaaccatcgccaagcgtggcggtggcgtgccaccgacgagtgtcctggaccagcaggtgctggaacgcctgatcgtcgagaacctgcaactgcagatcggtgatcgttccggcatccgtatttcggacgaagaactgaaccaggccgttggcaccattgcccagcgcaacaacatgagtatcgatcaattccgcgcggccctggcccacgatggtctttcgtatgaagatgcccgtgaccagatccgccgcgaaatgatcatcagccgtgtgcgtcagcgccgtgttgccgagcgggtccaggtgtccgaacaggaagtgaagaacttcctggcctcggaccttggcaagatgcagctctccgaagaactgcacctggccaacatcctgatcccgactccggacagcgccaactccgagcagctcaatgccgccgccgccaagacccaggctatctatgatcgcttgaaggcgggtgccgattttgcccaaatggcgatcgcccaatctggcagcgacaacgcactggaaggtggcgacatgggctggcgtaaagccgctcaactgcctcctccgttcgaccgtgaactgagtgcaatggaagtgggtggcatcacccaacctgcgcgcacaccgggtggtttcatcatcctgaagctcctggaaaaacgcggcggcgaaacttcactcaaggatgaggtgcacgttcgtcacatcctggtcaaaccaagcgaaatccgcaccgaagcgcaaaccaaggaattggcccagaagatctacgaccgcatcgaaagcggtgaagacttcgccaccctggccaagagtttctcggaagacccgggttccgccctcaacggtggcgacctgaactggatcgacccgaaagccctggtgccagagttccaggacgtcatggccaagaccccgcaaggcgtgctgtccaaaccgttcaagactcaatatggctggcatgtgctggaagtccttggccgtcgcgccaccgacaacaccactcaagcccgcgagcaacaagcgctgaacgtactgcgtaaccgcaaatacgacgaagagctgcaaacctggctgcgtcagatccgcgacgaagcctacgtggaaaacaagctgccaggcgccagtcaaacaggcaccgaccaggcagcgcagtgaaaccccagcgttttgcggtgacacccggcgagccggccggcattggtcctgacctgtgcctgctgctcgcctcgcaaccccagccataccccctgatcgccattaccagccgtgacctgctccttgagcgggccgcgcagctgggtgtggctgtcactttgctggacgtggcgccgggcaactggcccgatctgcccgcccccgcaggcagcctgtatgtgtgggaaaccccactgcaagccaaggtgattgccgggcaactggacaaggccaacgcagcgttcgtgctcgaaaccctgacccgcgccgggcaaggctgcatcgacggcgacttcgctggcatgatcaccgccccggtgcacaagggtgtgatcaacgaatccggcatcgctttttccggccataccgaattccttgccgaactgacccacaccgagcaggtagtgatgatgttggccacgcacggcctgcgggtcgccctggtgaccacgcacctgccgctgcgcgacattgccgacgccatcaccgtcgagcgactggagcgcgtgacgcgcatcctgcacgccgacctgcaacagaaattcggcattgcccagccgcgcatcctggtctgtgggctcaacccccacgccggtgaaggcggccacttgggccacgaagaaatcgacatcatcgaacccaccctggagcgtctgcgccaagaaggcatggacctgcgcggcccactgcctgcggacactctgtttacccccaaatatctggagcactgcgatgcagtgctggcgatgtaccacgaccaggggctgccggtgcttaaatacaaaggcttcggcgccgccgtcaacgtgacactgggcctgccgatcatccgcacctccgtcgaccatggcaccgccctggacctggcgggcagcggcaagatcgataccggcagcctgcacgtggccctggaaaccgcctatcagatggccgagacccgtatatgactgagcattaccaacaccgggcgcgcaagcgcttcgggcaaaacttcctgcacgacgctggcgtgatcgatcgcatcctgcgctccatccatgccaagcccgaagaccgtctgctggaaatcggcccgggccaaggcgcgctgacccaaggcctgctggccagcggtggccaactggacgtggtggaactggacaaggacctgatcccgatcctcaaccagcagttcgccggcaagcccaacttcaacctgcatcagggcgatgcgctgaagttcgacttcaacaccctcaacgccgcgcccaacagcctgcgcgtggtgggtaacctgccgtacaacatctccacgccgctgattttccacctgctgaacaacgccgggatcatccgcgacatgcacttcatgctgcaaaaggaagtggtcgagcgcctggcggcaggccctggtggtggtgattggggccgcctgtcgatcatggttcagtaccactgccgtgtcgaacacctgttcaacgtcggtccgggtgcgttcaacccaccgccgaaggtcgattcggcgattgtgcgcctggtgccccacgcggtactgccgcacccggccaaggaccatcgcctgctggaacgcgtcgtacgcgaagcgttcaaccagcgccgcaagaccctgcgcaacacgctcaaggccttgctgagcaacgccgagatcgaagctgccggcgtcgatggcagcctgcgtcccgagcaactggacctggccgcgttcgtgcgcctggcggaccagttggctatccagcctgcgcccgcagcggaatagagcctcccggggataggccagacagcatgtctggcctagtgcccacctcttggcctagactgacccgcatctgctgtcctccgcttttaaggcctcttgcatgtccgatcctcgctaccagatcgacgtcagcgtcgtcacccgcttcctggcggaccaatcgcaacctgaacagaaccgcttcgcctttgcctacaccatcacggtgaaaaacaacgggctggtaccggccaagttgctgtcacgccactgggtgatcaccgacggtgacggccaggtcgaagaagtgcgcggcgcaggcgtggtcggccagcagccgctgatcgacagcggcgccagccacacctacagcagcggcacggtgatgacctccaaggtcggcaccatgcaaggctcgtatcaaatgaaggccaccgacggccaactgttcgacgccatcatcgcgccgttccgtcttgccgtgccgggagccctgcactgatgacgacgtatgcggtcggtgacctgcaaggttgcctggagccgctcaagtgcctgcttgagcgcgtagccttcgatccggcaagtgaccgcctgtggttggtcggcgacctggtcaaccgcggcccgcagtccctggagacgctgcgctacttatatagcctgcgcgattccctggtgtgcgtactgggcaaccacgacctgcacctgctggcggcgtgcaacaacatcgagcgcctgaaaaagggcgataccctgcgggaaatcctcgaagcacccgatcgtgccgaattgctcgactggctgcgccgccagaaaatcatgcattacgacgaaggccgtaacgtggccctggtccatgcgggcatcccgccccaatggtcattgaaaaaagccctcaagtgcgccgccgaagtcgagagcgccctggccgatgacaacctgtacaccgcctacctcgacggcatgtacggcaacgagccggtcaagtgggacaacgacctgaccggcgtcacacgcctgcgggtcatcaccaactacttcacgcgcatgcgcttctgcaccgtcgagggcaagctggacctcaagagcaaggaaggcgccgacaccgcgcttcccggctataagccttggttcgcccacaaagaacgcaagacccgtgacaccaagatcattttcggtcactgggctgcacttgaaggcaagtgcgatgagcctggcgtattcgccctcgacaccggttgcgtgtggggcggcgccatgaccctgatgaacatcgacaccggcgagcgttttagctgccagtgcgaatcccccctgcccgttacactgccggctgccgccaggccctaggagccatccatgagcgaattcaaacgtatccctcccgaacaagcccaggccctgcgcgagcaaggtgccgtggtggtcgatatccgcgaccagccgacctacaacgccgcacacatcaccggtgccaagcacctggacaacgtcaacatcgccgacttcatccgcgccgccgaccttgacgcaccggtaatcgtggcctgctaccacggcaactccagccagagcgcggcggcctacctgatcagccagggcttctccgacgtctacagcctggacggcggctttgagctatggcgtacgacctatcctgcagaaatttcctcaggcgattcgcaataatttttttcacaccccgctaccccgcgtgacgcttgggcttgcgccgtttctgacgaacggcgcagccaaactaattgcgcatcgcgccttgacctctgcgattccgaactatccttaagcgcaggccatccgaatcaggggagagccggtacaccggcgtgcgggtcatcggtagcgtttcagggtgttctggggggaaaacagccattggcgttcgtcaatgtctgccagcatcgactgattgatccggcgtcggctccacgtatcgagcgaggtgacgacgtcatgagtattttcagccacttccaacaacgcttcgcgtccacacagcaggaagaactcacgctgcaagagtatcttgaactgtgcaaacaggaccgcagcacctacgcgtctgccgccgaacgtctgctactggcgattggcgagccgcagttgatcgacacctcgaataattcgcggctgtcgcgaatattctccaacaaggtgatccgtcgctacccggcctttgaagacttccatggcatggaagaatgcatcgaccagatcgtctcctacttccgccatgccgcccaaggcctggaagagaagaaacagatcctctacctgctcggccccgtcggtggcggtaaatcgtccctggccgaaaagctcaaacaactgatcgaaaaggtgcctttctacgccatcaagggttcgccggtgttcgagtcgcccctgggcctgttcaacgccacggaagatggcgcgatcctcgaagaggacttcggcatcccacgccgctacctcaacaccatcatgtcgccctgggccaccaagcgcctggcggagttcggcggtgacatcagccagttccgcgtggtcaagctctacccctccatcctcaaccagatcggcgtggccaagaccgaaccgggcgatgagaacaaccaggacatctcggcgctggtgggcaaggtcgatatccgcaagctcgaggaatacccgcagaacgacgccgacgcctacagctactcgggcgcactatgccgggccaaccagggcctgatggagttcgtggagatgttcaaggcacccatcaaggtgctgcacccactgctgaccgccacccaggaaggcaactacaacagtaccgaaggcctcggtgcgattccgtttaccgggatcctgctggcccactccaacgaatcggagtggcacaccttccgcaacaacaagaacaacgaagccttcatcgaccggatctatatcgtcaaggtgccgtactgcctgcgggtcagcgatgaaatcaagatctacgacaagctgctgttcaacagctccctggccaaggcgcattgcgcacctgacaccctgaagatgcttgcccagttcaccgtgctgtcgcgcctcaaggagccggaaaactcgaacatctactcgaagatgcgcgtgtacgacggcgaaaacctcaaggacaccgaccccaaggccaagtcgatccaggaataccgcgacaccgccggtgtggatgagggcatgaacgggctctcgacgcgttttgcgttcaagatcctgtccaaggtcttcaacttcgacccccacgaaattgctgccaacccggtgcacttgctctatgtgctggaacagcagatcgaacaggagcaattccaggcggaaacccgcgaacgctacctgcgtttcctcaaggaatacctggcaccgcgctacatcgagttcatcggcaaggaaattcagactgcgtacctggagtcctacagcgagtacggccagaacatcttcgaccgctacgtgctgtacgccgacttctggatccaggaccaggaataccgcgacccggaaaccggcgagatcctcaaccgcgtggccctcaacgaggaactggaaaagatcgaaaaacccgccggcatcagcaatccgaaggatttccgcaacgaaatcgtcaacttcgtgctgcgcgcccgggccaacaacaacggcaagaacccgacctggctcagctacgagaaactgcgggtggtcatcgagaagaaaatgttctccaacaccgaggacctgctgccggtcatcagcttcaacgccaaggccagcaaggaggaccagcaaaaacacaacgacttcgtcacacggatggtcgagcgcggctacaccgacaaacaggtacggctgctatccgagtggtacctgcgggtgcgcaaatcgcagtaaggcagcgacaggcgtgcgctgccgggcttctggcctggcagccgaccgcttgtctctaagcttccagctcgcggcttgaagcttgtaacgtgaagctgcccggagggctccccatgagctatgtgatcgaccgacgcctcaatggcaagaacaagagcacggtaaaccgccagcgtttcctgcggcgttaccgtgaccacatcaaaaaggccgtcgaagaggccgtcagtcgccgctccatcacggacatggagcatggcgaacaaatcagcattcccggacgggacatcgatgaaccggtgctgcaccacggccggggcggtaagcagaccgtcgtgcaccccggcaacaaagagttcaccaccggcgaacatatccagcgtccccaaggcggtggcggcggcaaaggcccaggcaaggcgggcaactccggcgaaggcatggacgagttcgtgttccagatcacccaggaagagttccttgagttcatgttcgaggacctggaactgcctaacctggtcaagcgcaacctgaccggcaccgacaccttcaagaccgtacgtgccgggatcagcaacgagggcaacccctcgcgcatcaacatcatccgtaccctgcgctcggcccatgcccggcgtatcgccctgtcgggcagcagccgcgccaaactgaaggaagccaaggaagagttggcgcgcttgaagcgtgaagaaccggacaacttcggcgatatccagcaaattgaggcagaaatcgagaaactcagcgcgcgtattcaccgcgtgccatttctggacactttcgacctgaagtacaacctgttggtcaaacaacccaaccccagctccaaggccgtgatgttctgcctgatggacgtgtccggctccatgacccaggccaccaaggacatcgccaagcgcttcttcatcctgctgtacctgttcctcaagcggaactacgacaagatcgacgtggtattcatccgccatcacaccagcgcccgggaagtcgacgaagaagagttcttttattcgcgggaaaccggcggcaccatcgtctccagcgccttgaagttgatgcaggagatcatggccgaacgctacccggccaatgaatggaacatctacgcggcgcaagcctcggacggcgataactggaacgacgactcgcccatctgccgcgacatcctgatcaaccagatcatgccgttcgtgcagtactacacttacgttgaaatcaccccccgtgagcatcaggcgctgtggttcgaatacgagcgcatcggcgaagcctttgccgacacgttcgcccagcagcaactggtctcggccggcgatatctacccggtcttccgtgaactcttccagcgcaggttagtgacatgaccgccaaaaaagagcataagcgccaacccatctccacggggtctgagtggacctttgaactgatccaggcctatgaccgggaaatcagccgcatcgcggcgggttatgccctggacacctaccccaaccagatcgaagtgatcaccgccgagcagatgatggatgcctacgcctcggtgggcatgcccctgggctatcaccattggtcctacggcaagcatttcctcagcaccgaaaagtcctacacccgcggccaaatgggcctggcctacgagatcgtgatcaactccgacccgtgcatcgcctacctgatggaagaaaacaccatctgcatgcaggcgctggtggtggcccatgcctgctacgggcataacagcttcttcaagggcaactacctgttccgcacctggaccgacgccagttcgatcatcgattacctggtgtttgccaagcagtacatcatgcagtgcgaggaacgccacggcatcgatgcggtagaggacctgctcgactcctgccacgcgctgatgaactacggcgtcgaccgctacaaacgcccgtacccgatttccgccgaggaagaacgcctgcgccagaaagagcgcgaggagcatctgcagaagcagatcaatgacctgtggcgcaccattcctaaaaagacaggaaaaaacagcgacaaggacaatgcacgcttccccgccgaaccgcaggaaaacatcctgtacttcctggaaaaacacgcgccattgctggagccatggcagcgcgaaatcgtgcgtatcgtgcgcaagatcgcccagtacttttatccacagcgccagacccaggtgatgaacgaaggctgggccacgttctggcactacaccctgatgaatgacctgtacgacgaaggcctggtgaccgacggtttcatgatggaattcctcacctcccacaccagcgtggtcttccaacccggcttcgacagcccttactacaatggcatcaacccctatgcgctgggctttgcgatgtaccgcgatatccgccgcatgtgtgagcaccccaccgaagaggaccgccgctggttcccggaaatcgccggcagcgactggctgtccaccatcaagttcgccatgagcagcttcaaggacgagagctttatcctgcagtacctgtcgcctcaggtaatccgcgatctcaagctgttcagcatcctcgacgacgacctcaaggatgacctggtggtgccggccatccacgacgagccgggctatcgcaccatccgtgaaaccctggcggcgcagtacaacctgggcaaccgcgagcccaacgtgcagatctacagtatcgacgtgcgcggcgaccgctcgctgaccctgcggcaccagcagcacgaccgcaaacctttgggtgaatccaccgaggaagtactcaagcacctgcatcggctatggggctttgatatccacctggaaaccctgcaaggcgatcaggtgatgaagacccaccatgtgccaccgcgcagcgatcacaacgacaacgactacggccgattggacctggctgtcgttcatctctgaaacagcaaagcctccattggtcaggcacaggcggtatcctgtgcctgacc

SEQ ID NO: 56 - DNA, 21276 bp, Pseudomonas nodulensis
ggtcaggcacaggcggtatcctgtgcctgaccaatggaggctttttcatgaaaatctataaagtcggcggtgcggtacgggatcgcctcttgggcatcccggtcaccgatattgaccgcgtcgtggtgggcgcgactgccgaagagatgctagccaagggctataagccggtgggcgcagacttcccagtgttcctggacccgaaaaacggcgatgaatacgccctcgcccgcaccgaacgcaaaagtggccggggttacggcggctttgcgtttcacgcgagccccgaagtgacgctggaagaagacctgatccgtcgcgacctgaccatcaacgccatggccgaagacgatgacggcaacttgactgacccttatcacggccagcgcgaccttgaagcccgtactttgcgccacgtttccccggcgttcgccgaagatcccctacgcgtactgcgcgtggcgcgatttgctgcacggtatgcgcccctgggttttaccgtcgcgccacaaacgctggagctgatgcgtcaactcagcgagtccggcgaattggaagccctgacgccggagcgcagctggaaagaaatctcccgggcgctgatggaagatcaaccgcaggtatttatccaggtgctgcgtgactgccaggcgctgaaaaccttgatgcccgaggtcgatgcattgttcggcgtgccacaacctgaagcccatcacccggaaatcgacaccggcgtgcacaccctcagcgtgctagaacaagccgctttgcatcaacagccactgactgtgcgctgggcctgcctgctccacgacctgggcaagggtacgacgcctgtggataagttgccgcagcacatcgcccacgaacaccggggcttgacgctgatcaagacggtcaatgaacgcttcaaggtgccgagggattgccaggaattggcactgctggtgggccaatatcacacccatggccatcgggctctcgagctgaaggcctcgaccttgctggagttgctgcaaagtttcgacgtgtaccggcggccgcagcgctttgaagagttcgtggtcgcctgcgagatggacgcccgcggtcgcaagggcctggagcaaagaagttatccacaggcggattatctgcgcggggcggccaaggcggcccgcgaggtagccgttgcgccactgctggagaaaggtttcaaaggcccggagctgggtgaggcgctcaagcgcgaacgactaaaagcgctgaaggcctacaaagaacaacacgccctgatgtaggagcgagcttgctcgcgaaaaacctgagagcgctgcgctatcgttgacgttcttcgcgagcaagctcgctcctacagaagagcgtttggtgtcagtggctggccctgccattcgaacgcgacaggcgccagcacctggtcgatctgcgcatcgcgccacaactcggctagcgtcttgcccgcctcgggatgcacgcgctccggcgccatcaacgacagcggccacaacacaaaggcgtttttcaggatctcggccctaggcaggatcaaaccgtcaaagttgcccaccaggtcgccaaacaacaacacgtcgatatccaacggcagccctttgcggtccggcgcatagcgaccattgtcggcctcgatgaatttcaaccggcgatccagttccatcagcggcagatcggtatacgccgacaccaccagattgaagaacggcccactcttgatgcccaccggctggctttcgaacaccgccgagcagcgcatatcggtcaagaaactcgccagcgcatccaagccggcgcacaggtgagactcacgctcgatattgctgccgaggccaaggtaaacctgagttagcgacatccgcgctcgatctccacgcccacgcccttggcagccggcacggcaccaggcttggtcagcttgaggtgcagccagggaatctggaattcactcatcagcacttccgccaggcgctcggcaaaggtttccaccaactggtactgggattgctcggcaaaggcctggatgcgcgcggacacgctggcgtaatccagcgccagggtcaggtcgtccccggccgcagccgggcggttgtcccaggcaaagctcaggtccaggcgcaggcattggcggattccgcgctcccagtcgtaggccccaatgacggtgtcgacttccaggccttcgataaacactctgtccaagcactcttctccgcagcacgacaagggcgcgatgccccgttagaatcagggcgtcctcgcccggaatagttagcatgttttggtcactggcgattttcgcctacctgctcggctcgctgtccttcgccattttgctcagccgcctgacgggaaaccccgatccgcgaatgagtggctcaggcaatgccggcgccaccaatatgttgcgcctggccggcaagaagctcgccgtgctgacgctgctgggcgacctgtgcaagggcttgttgcccgtgctgatcgccagcctggccggcctgcccctgcaacagcaggcctggatcggcgtctgcgcggtcctcggccatctgtttcccctgtacttccgctttcgcggcggcaaaggcgtcgctacggctgccggcatgctgctggggatttatccaccggcagcgttgctggctgtactcgcctggctgctgacgttctacctgacccgcaccagctcactcgccgcgctgatcgccaccccgctcaccctgccgttgctggcctggcaagaaccggcggcgctgctgccgatgagcgtgctgacactgctgatcgtctggcgccaccggggcaatttacgcgacctgtttgccgggcgcgaacggcatttttaaataccttcaattcacgttgcggcgttacagcggcgacaactgctccatcggccaacgtgcctgcacgctgatcgccaggctttcatgctgcccggcctgcaggcgctggcaaccggcgtaggcgatcatcgcgccgttgtcggtgcagaattccggccgcgcgtagaacacatcgcctttcatgtcgccgagcattttttccagcgaagtgcgcaaggccttgttggcactgacgccgccggcgatcaccaggcgcttcatgctggcctgcttgagggcgcgtttgcacttgatggtcaaagtctccaccacggcctgctggaacgccagcgcgatgtcgcaacgggcttgctcactgtcgtccccggcgctgacgctgtgctgccaggtgttcaacgcagaggttttcaagccgctgaaactgaacatcaggccggggcgatcacacatcgggcgcgggaaggtgtagcggccggccacgcctttttcggcaagacgggcgatttccgggccgccgggataattgaggcccatcatcttcgcggtcttgtcgaaggcttcaccggcagcatcgtccaaagattcacccaaaagggtgtattggccgattccgtccacctgaaccagctgcgtatggccgcccgaaaccaacaaagcgacgaacgggaactgtggcggggttttctccagcatgggagccaatagatggccttccatatggtgcacgccgagcgccggaatgccccaggcaaaggccagcgcctgggcgcaagaggccccaaccagcagggctccgaccaatccggggccagcggtgtaggcgatggcatcgatctcggtcggcacgcagccggcctcgtccagcacctggcggatcaggggcagcatgcgcttgacgtgatcacggctggccagctccggcacgacgccgccataggcacggtgcaggtcgatctggctgaacagcgcatcggccaggagcccgcgttcactgtcgtaaagtgcgacaccggtttcgtcgcaggaggtttcaagtcccagtactagcatgggtttgcgccttgtagaggctgaattcgaaggcgcgcataatagtcgccactccccctcccgactagcggttttcgatcagaggctttgcattccgggcaatgaggggttaacatccgcaacccttaaaaaccgacgacctcagccgcgaattttttgcgacgagaacgttgatcccggtaatgaaagaaggtagctctggatgccagccgtcaaagttaaagagaacgaacccttcgacgtagctctgcgtcgtttcaagcgctcctgcgaaaaagccggtgtactggctgaagttcgtagccgcgaattttacgagaagccaacttctgagcgtaagcgcaaagcagcagccgctgttaagcgtcacgccaagaaagttcagcgcgaacagcgccgcgccgttcgtctgtactaatacacagacgttcgtagcaagcttctgccaagcccggccctcagccgggctaatggcatttgcggatatcgcttgatgcttcaccgttgacgccgcacatgcgaccgagacaactgcttcacacgtcaggactggctcttttgccagcggtgcacgtctcttctgacgagcctatcaaggctactgacgagcacactcattctgtaaacagccgaccaaccgtgtcgactgcgcccaacgaggcgtttccgaggcccatcaacggccaagaccggacgccggggcaacatttccacaccgaagactgatcagaaactaacgtcagtgaatattcggcagatacacttccgtacaacccatgcagtcgctggatgctcgagcactcgatacgcgcgcttgaacacctcacgggccctcatttacacgcagtgatgacgagaacgccatggccgggctgattccccagagctttattgacgaccttctgaaccgcaccgacatcgtcgatgtggtcagctcgcgcgtgcaaatgaagaaagccggcaagaactacaccgcctgctgcccgttccacaaggaaaagaccccgtcgttcagcgtcagccccgacaagcagttctactactgcttcggctgcggcgcgggcggtaatgccctcggcttcatcatggaccacgacaacctggacttcccccaggccgtcgaggaactggcgaaagccgccggcatggaaatcccccgcgaagaaagcggccgcccgcacaaaccgcggcaacccaccgattcgccgctgtacccgctgctgaccgccgctgccgacttctaccgtcaggcgcttaaaagccatccgcagcgcaaggccgccgtcgactacctcaagggacgcggcctcaccggcgaaattgcccgcgactttggcctggggttcgccccgcccggctgggacaacctgtacaagcacctgagcagtgacaccctccagcaaaaggccatgatcgacgccggcctgctggtggagaacgccgagaccggcaaacgctatgaccgcttccgcgaccgcgtgatgttcccgatccgcgacagccgaggccgcatcatcgcctttggtggccgcgtactgggcgacgacaagccaaaatacctgaactccccggaaaccccggtgttccacaaaggccaggaactctatggcctgttcgaagcccgcaagaacaaccgcaacctcgatgaaatcatcgtggtcgaaggctatatggacgtgatcgcgctcgcccaacaaggcctgcgcaacgccgtcgccactttgggcaccgccaccagcgaagaacacatgaaacgcctgtttcgtgtggtgcccagcgtgttgttctgcttcgacggcgaccaggccggccgcaacgccgcctggcgcgcgctcgaagctacgctgtcgagcctgcaggacggacgccgtgcgcgcttcctcttcctgcccgaaggtgaagacccggacaccctggtgcgctccgaaggcaccgacgcattccgcgcgcgcatcaatcaacacgcgcagccgctggccgactatttcttccagcaactgaccgaagaagcagatccgcgctccctcgaaggcaaggcccatatggccaccctcgcggcaccgctgatcgataaagtaccaggcgccaacctgaagtccctgatgcgcatgcgcctgctggaaatcaccggcctcagtggcgaagccgtcagccagctggtgcataacgcaccgcatgacgcagcgccacccgcctacgacccaggcatggattacgacgccatgccggactactccgacttccaccaaccccaggaggcctacgcgccccaacaggagtggacgccgaagaaacccggtgccggcggcaagaaatgggacaagaaaccctggagcaagaacggcaagcgcggcgacggcgatgaggcctacgccccgcgcaccccggttgccgtggaagcgccgacgctgattgccctgcgcacgctcatccaccacccgcagctggcggagaaagtcgagagcgcggatcattttgccaacgagagcaacacctatgcccaggtactgatcgccctgatcgaggcggtacagaaaaatcctaagctaaactcaattcaattgatggctcgttggcatggcaccgaacaaggccgcctgctcaaagcactcgcggaaaaggagtggctaattgacggcgataaccttgaacaacagtttttagacaccattactaggttatccgcgggtcagcacacgcagaccctcgatgaactgatcaagagagcgaggcagccgggattgtcggctgaagagcaaattcagatagcaaaacagatgcgcgacctcttaaaacagaatgtttccgcatcaaacccgacctcagctggcgtgtgaggtcatagctcgggtataatcctcggcttgttttttgcccgccaagaccttcagtggatagggtgttatgtccggaaaagcgcaacagcagtcacgtatcaaagagttgatcgttctcggtcgtgagcagggttacctgacttacgcggaggtcaacgaccacctgcctgaggatatttcagatccagagcaggtggaagacatcatccgcatgattaacgacatggggatcaacgtattcgaagctgcgccagataaggattcccttatgctggcggacgccgataccgacgaggctgccgcagaagaagcggctgccgcgctggctgctgtggagaccgatatcggtcgtaccaccgaccctgtgcgcatgtatatgcgtgaaatgggtaccgtcgagctgctgacacgcgaaggcgaaatcgaaatcgccaagcgtatcgaagagggtatccgtgaagtgatgggcgcaatcgcgcacttcccaggcacggttgaccacattctctccgagtacacccgcgtcaccaccgaaggtggtcgcctgtccgacgttctgagtggttatatcgacccggacgacggcattgcgccgcctgccgctgaggtaccgccgcctgtcgatgccaaggctgcgaaagcggacgatgactccgaagacgacgacgctgaagccagcgacgacgaagatgaagtcgaaagcggtccggacccgatcatcgctgcccagcgtttcggtgcggtttccgatcaaatggaaatcacccgcaaggctctgaaaaagcacggtcgcgccaacaagcaggcgattgccgagctggtggccctggctgagctgttcatgccgatcaagctggtgccaaagcaattcgaaggcctggttgagcgtgttcgcagtgccctggagcgtctgcgtgcccaagagcgcgcaatcatgcagctgtgcgtgcgtgatgcccgcatgccgcgtgccgacttcctgcgccagttcccgggcaacgaagtagacgaaagctggaccgacgcactggccaaaggcaaggcgaaatacgctgaagccattggtcgcctgcagccggacatcatccgttgccagcagaagctgactgcgcttgagaccgaaaccggtctgacgatcgccgagatcaaggacatcaaccgtcgcatgtcgatcggtgaggccaaggcccgccgcgcgaagaaagagatggttgaagccaacctgcgtctggtgatctccatcgccaagaagtacaccaaccgtggcctgcaattcctcgacctgatccaggaaggcaacatcggcttgatgaaggctgtggacaagttcgaataccgtcgcggctacaagttctcgacttatgccacctggtggatccgtcaggcgatcactcgctcgatcgccgaccaggcccgcaccatccgtattccggtgcacatgatcgagacgatcaacaagctcaaccgcatttcccggcagatgttgcaggaaatgggtcgcgaaccgaccccggaagagttgggcgaacgcatggaaatgcctgaggataaaatccgcaaggtattgaagatcgcaaaagagccgatctccatggaaaccccgatcggtgatgacgaagactcccatctgggtgacttcatcgaagactcgaccatgcagtcgccaatcgatgtcgccactgttgagagcttgaaagaagcgactcgcgacgtactgtccggccttactgcccgtgaagccaaggtactgcgcatgcgtttcggcatcgacatgaataccgaccacacccttgaggaagtcggtaaacagtttgacgtgacccgcgagcggatccgtcagatcgaagccaaggcgctgcgcaagttgcgccacccgacgcgaagcgagcatctgcgctccttcctcgacgagtgacaccagaacccccggcccaggccgggggttttgttttgtatagataaaatccctcgcaacgcccctccctcgcaatgcccgtctacactcgaaacattccccgtgccataacgagaccgttatgcccagattgccgactgtgttactgctgtcgctgctgacctggaccgcaacggctggcgcgttgactctcactgatgatgagcgtggctggttggcggaccatcaggagctgcgcctgggggtggacgcgtcatggccaccctttgaataccgtgacgaagagggtcgctaccaaggtttggcggcggattacgtgcgtctgatccaggatcgcctgggtatacgggtcaagctgatcgaaccggtgaactggagcgcggtgctggagctggcccgcaacaaccagctcgacctgctgcctggcatcatgtccacaccggagcgccaaggttacatggcgttcactcgcccgtacctggacttccccatcgtcatcctggcccacgaaggcggggccaaaccgcgcaacctgaaggatctctacgggctgaagattgccgtggtggaaaactacgcgccccatgaactgctgcgcacgcaccatcccgacctcaacctggtggccatgccgaatgtgagttcgacgctgcaagccttggccacggacgaagtggatgcggtcgtcggcgacctcgcctcaagcgtctggagcctgcgccaactcaagctcgacggcttgtacgtcagcggcgaaacgccctaccgctaccagttggcgatgggcgtaccgcgcgacaacaaaatgctggtgagcatcctcgacaaggtactggccgaccttagcgcggaggaaaccgacgcgatccagcaacactgggtcggcagctttaccgaccaccgtacgttctggaccgacttgctgacttacggcctgcccacagtgttgctgctgagtacggtgctggccgtggtgatccggatcaatcgccggctcagttcggaaatctcccgccgcgtagccctcgaacaggaactgcgcagcagcgagtaccactatcgcggcctggtggagagcttgtccgcgatcgcctgggaagccagcgttaccgatttcacctacagctatgtatcaccccacgccgaggaactgctgggttacccgcgggcccactggctgattccgggcttctggcgcaacatcattcaccccgccgacctgattcgcaccgaatcctactgccaacgcgaaacccgcgccaaccgtgaccacagcgttgattaccgggtcatcaccgccgacaaccgttgcttgtgggtgcgtgacatcgtcagcctgatcgagcacggccatgagcccgtgctgcgcggcttgatgatcgacatcagtgaggcaaagcgcaccgaagaggccctgcaactgtctgagcagaagttcgcctcggtgttccagcaatgcccggacatcctggtgattgcacggctgtccgacggctgcctgctggaggtgaacaaagcgttcgaggaccaggtcgggctgacagccgaacaggtcgtgggtaaaaccgctaccgagctgaacatctggggcatccagggcgcaggccccgatctgctgcagcggttgcagaccaccagcatccgcaacctggaaatgcccttcctgcgcagcaatggccaagccttcaccgggctgatttccgccgaaccgtttcaactcgacaccacagaggccatcgtggtggtggtgcgcgacatcacccaactcaaggaaacccagcaacagctgcaaacctccgaggagaaattcgccaaggccttccacgcctcccccgacggcttgctgttgagccgccagcgcgatggcctgctgatagaagtgaacgatggtttcagccggatcacaggtttcaacagcgccgcctccgtcgatcagtccaccttggacctgggcatctgggtcgacctcaacgaacgcaaacacatgctcgaactgatgcagcgcgatggctttgtgcgcgacttcatctgccacatacgccgcagcgatggtcagattcgcctgtgcgagctatccagccgcccactgccgattggcgatgacgactgcatgctgaccatcgcccgagacatcaccgaacgccaactgatgcaggaaaaactgcaacaagctgccaccgtgttcgagagcacagccgaaggtgtgttgatcaccgacacccggcagaacatcagcgccgtcaaccgtgccttcagcgaaatcaccggctacagcgaggccgaagccctcggtagcaccccgcgcctgctcgcttccggcctgcacgacagcgcgttttatgcggcgatgtggcaccaattgaccgcccaagggcactggcaaggcgagatatccaaccgtcgcaagaacggcgagttgtaccccagctggctgaccatcagtgccgtgcgcaaccgcgaccagttgatcacgcatttcgtcgcggtgttcgccgacatttccagcctcaaactggcccaggcgcgcctcgactaccaggcgcatcacgaccctttgaccggcttgcccaaccgcacgctgttcgaaagccgactgcaggccgccctcaacggccaccaggaaaccggcaaacaaggcgccgtgctgtttcttgacctggaccgtttcaaacacatcaacgacagcctcggccacccgatcggcgacctgctgctcaaagacatcgccgtacgcctcaaggagcaactgcgcgacatcgacaccgtggcacgcctgggcggcgacgaattcatcattctgctccccggcctgcagcacgccaacgacgcccagaacctcgccaataaactgctggcctgctttacaccgccgttccaggccggtgagcacgagttctttatcagtgcgagcatcggcaccagcctctacccacaggacggcaccgacgtcgccacgctggtcaagaacgccgacgcggcgatgtaccgctccaaggccaaggggcgcaaccgggtcgaaagctacacccgcgacctcaccgcccaggccaacgagcgcgtggcgctggaacatgaactgcgtcgcgccatcgagcgcaacgaactaagcctgtactaccagcccaaacggagcctgatcacccaggaactgatcggtgccgaagcattgatccgctggcatcaccccacttttggcgacgtaccgcccgaacacttcatcgccctggccgaagagaacggcatgatcctgcagatcggtgattgggtgctggagcaggcctgccggcaactgcacacctggcaaggcacgttcgaggagttcggcccactgtcggtgaacctggccggcgctcaactgcgccaccccggcttgctggcacgcatcgaacagctattgcgcgactatcgactcgacccgggctgcctgcaactggagatcaccgaaaacttcatcatgagccaggccgaagaagcgctggaggtgctgcaccaactcaaagacctcggcgtacaactggcaatcgatgacttcggcaccggttactcttccctcagctatctcaaacgcctgcccctggattacctgaagatcgaccaatccttcgtccgcggcctgcccgacgacccccacgacgccgccatcgtgcgcgccatcatcgccctgggccacagcatgcaattcaccatcatcgccgaaggcgtggagaaccccgcacaacaagccttcctcgccgccgaaggctgcgaacagatgcaaggctacatcgtcagcctgccgctgccgccggagctttttgctgctacgtttcttcgtatgagcattgaggatttttcggatggcacagcggggaaaccatcgttataatccgcgacctgttacagggcctatagctcagttggttagagcagtggactcataatccattggtcgtaggttcaagtcctactgggcccaccaattcgaaagccgcgcattgcgcggcttttgtgtgtctggcttttgttttacgcacgaatttctgctggaaagccacgctctacgaccgggtcatcctcattcaagccaagcaattctgcgacatggaagacaagaggatccccggtctgctcggtctcagagcgcttaccattgtcatcgtactgatcgtatatcgctccagggtggcaatatctctggaggacatcgtcgaccatgttgaccaagccttctaacggtattgccttacgtcttttcaggcagaacgagcactcagcagtcacgccggctcgcctgatcaatccaatgagataggcttcgttcaagcattggtggcagatcaggtcttcatccatggggctgtgcctagcagagttcagatggcggtgattctaagtcacctcagagttgtggcccgatgaaaatttgctgaactcccagtcgccgccttaagagtctctctttagggggctacccctggcatggatttttcagctgctaaccaatgcaatgcaccactgcccatgaaagcctcctgtggcgtctatgcggatccaagagaacctttcggcggtagccacacgccatattatgagctagacaaccagaaaaactctcagcatgattcatcattgcctaaaagcttgcctagcaagctaagtttttgctcaacaatcagccctcatatcaaaacacaatgctttaaacctacctctcgaatgggggaatgcatggataaaatttccgaacacacccgccaaggtggcatactttcgaatgccatgtttgatattgaacatgcgctgggaatgtttgcctacagctactgtacaattccagctgaggcaatctacgataaagaattattgaaacctatgatggatgttatatccgcctgccacatctacataatcggctacacccccataataaactttatcgatgctaatcaagacggcgaaaaacttactttggacttcagaattctcagcaaaaaccattctgtctcctatgacattcctggattaactctcaagaacagaaacgatgctccgtatttggaagacgaggacggagaggcatactggccgtctgcaacagaaactcaaactagactaaacatggagtcagatggcattaattttgatgtcaaatacattggccaagcctatggccaagatggctcaaggaatgctatagataggcttttgaagcatgagacgctgcagaaaatcgccttgaaaggggttccggacggctacaaactctccttactactgcttgctatacagccaacaaaccaattgataaccatgatgaatccatttgcgaaaaatggagatagtggagatttaagaatacagcagggacttaacaaagcacagaataccaccgaggtagaaaaaatatccatgtatgaagcggcccttattaggtacttctatccagaatacaataaagaattcaaagacagttttccatctacaaacttgaagatccttcatgactgctacgataaggatttcagtgccatagtagcggagatatgtatagatgagttgcctttcatgctgtgctcacaagaggtcaagccaaagcactatcatgtaattaagcatcacttgcacaaacaggaagatcgaaggatgtttttcgggatgtgatcagcctagcgacaggacgtccggtagaactctagtgggtgggttgttcctaagcttacatagttgtcggccagaatcatgaggcttgttatgactctggcccttgctcactgagccatgctagctggttctcgacccaaactcggctatccatttttgcagagctaagacgtcggcctcaaagacatccagttcaagagcgctgctggacaactcatccgactgggcatgctcaaataccgagtagcgtgtcatcaggtcatcaatgaataggcagtcctcattcgtcaccttggcgaccttgtgcagcttgccctgggtgttgattgcacgccggaaacgtcctacgacatctgccagcaggatgaactcaatcgtcttttcaacgatgatcctgaagtcactgcacgcgctcttgccaagcgcctcgtaagcatcgacctcagcgttttcctggtgcttcttgaggcgtgtgatagcgttatctatcagcccgcgcaccgcactttccggctttaggtctcgagcgcttgcagtcgcgacgatcccggcagttttcgccatcctctggagtgacgttagcgttggcttgactgagggcattcctgggatcagctcccattttttggtgacggcttctacctgagccaccagagaaagccgatgagtgaaaatgatgacctgccttgtctgagacagggccacgagacgctcgaccactttttcttcaaagtcctggtctagcgaagagatcgggtcatcgaaaatgaacggggctagttggtttgagcctgtagtgtccgcaaggaacgcggccaaggcagcgatcctggtttctccttcgctcaagatgtagtccagcccatgggtgccattcgcgcccaccaggctcaagccgaaggtgatcttgcccttgcccccggatttactttgcggcgcgattggaaggcggtggccgccgaggcgtttcaactcatctaggaatcgagattgatagccggcatcaagctccgtcttcgccagctcgtttttcttcgtagtcagggcattggtggcggctgagcgcgaagctttatcaatcgctgcaacggcgatcaacctagccctttcagcagtaattgatgccttgttttgataaagccactgcttggcttggagttgctggactcggctctgcatcgtctggcgatgctcatctttcaacaaggccgacaggctcagttcctcttcgatgagttttgcagatttggtctttgccgcctcgtttatgcccgaccagtcgaaaggttgcagggtgcctacagggctacccagtgcaatttgatcaaaccgtgctttcagcaggccaagccagctgagcccgtcggcttcttcaaagcctagagtggacatgtggacaatccagtcagcttgtcctggaagaaccggcagccgctttttgcggtcggcaaatccattttcagccgtcttggcggttgtttcgaggccgtcggtcacgaacttctcaaaccctgtcagtcgggctttggcgtcctcgctgaggctttggtggcaaagtacacaacgtgagtcagctgagacgttagggaatgctgtatcaacgtaggctgtactggtggaataagcgcgtgcttgctcccacattttctgccaagtcgctgaaccaactccctcaagctctgctttcccgaaaatagccgccgctgcctcttcgcaagtgctcctcgcttttacggcggtattcttgaggttttccagttcgaccgccgtcgcgtcgttcagacccagctgaagtgtcgacatcgctgtatcaatactcttcagcgcggttttttctttgttgatagctaaaagacgtccagcaatgtccttctctgcaagcaaggcttcgctctctatacgctcccgatcaagctggtcggtatacaggcattccttatcgatgctcgcgggcgtagtcgtgctcttcaatgcggaaagccatttcgcttctgctgtttgactaaggctctcagccatggcgggtagcgctctgctgagcaaagccttttctcttgcaagctcagcgctaacggcatctgcggtggcgatcagcgcagatacaaacttcatcctgcttggctcatagcaggcttcggttcttcccatgtactgattggcagccttgctgtcgaaaatctgcgcatgccgtagggccttgtgagggccgctggggatatcccagtgaatatcggctgactttccgtcgatggacaccttgaattgagcacggcatgccgtaggcgccgaatcaaacacgttgctgtgaatctcgtccttggaacgtgatccgcagatctgcttgagcaaccttgcaaacccgctcttgccggttccattctgtccgtagataacagacaggttgctcttaccgaaggggaggttggcgccaggctttattgcgttcaaaccatgcacatccaggatctcttcaatccgaagcaggggtctattggcaacctgcgataacgtgccgggcgttacgttcaaaaatcctgtgtcagcctcacctttggcttcgaccttgcagagcctggacagctctttgacttcgtcttggttcagctgccgcttcgagtcgataagcattcgagctgcagtctgcaaccatttggggcgtccattcagccacgtctcgaaatcatcagctacaaccggccctgcctcaatcttcttcatggtgcgctcatctcgcggggtaatccctgagcgtaggcgttaactggctttttggtattattgggccatcacaatcgttgcaagatgtgccattcaagacgatttgaggggcgtgagtgatgccagcttaagctctgatgtcactgtgactcagcgcagtcgcctcgacgtaccgggcaaggggtatattgatggcctcttgctaaagaaaattactcaactgccttcaagcatctccaactgccattctgggccagaagcttgaggatggaagcccgcagggccaaaacctggcgaagccagggtttggtttacgacagccgtcccccagcgggggcaagcctaaaactgcaacggcgtcatcgccatcgagctgcagttatgaagacatccggcattccccgcgtaacgcgtcagctttgttcaccagcccaggattttctcaacccctgcggtgagttcagcccgatcagtgaccctgctcaagtctttgtgatgaagggcgtcctctgcggcgtgcagctctttaaccttcgtcttgtcgtgcttattcaggagttgctctaggaagtacaggacttcgtagccttcgtccttatctacctgacgacgatccttgatgccggcataaggcgagtcgccttcatctcgagtccaagtgtaggtatagacatcggtttgaaggtttgagcgtttcagagttacagccatgtgaactccatttgcgtgatatagctgatatggaattgagcgctccgtgcatccaaaggccccgcctggtaggcgagcatggttgtgctcgggctagctaatcgtgcctcagcttttgcgtagtgtcactggattagtaacttcttgctatcacgcttcaggttactgctatgagttgatcttgtaagttcaattgggatggggtgaaaccttgcttggcatcttaagggccagagtagtgggtcgcactgcccggctggcttgcctatagccggggaatttaagggtcggttcgtcgtccacgtggaaaacaggtttggcaccagcgctcaaaggtatctcgcggtatagggcggtttggtctacgacgccttccggttcaagccactctcgggcgctaaaatagttggcccgtagatcataacttcagagccttttttcttttgttgggcggtatagctcaagaaatactcgtcctggcggtagctggtgtagatatcttttatttcgctcacgttgtcatatgaaacgatccaaggcttgtcgatactgcccagcgcgttagcgatctgtacgtgatcgtcgtgcacataaaagtttcgatagagaccagatcccttgatgtaataaggaggatcaagataggtgagggattttttggggagagtagggatgattttattaatgaagccaagagcgtcttcattgtagattttgattcgattcttatatttgccaattagctcaatgcgcttaattagctcaggcttattgaaacgaacatctagcttccatttgcctgcttgttcttttccgccaataactcctgccttcaagatgcccgagcgattagtacgattaagaaagaaggttgccatggctagatccacgactgagcaatcttcgggattatcaagcacggccttaaacctatgccagttttccatggtgacaggcgtgtcggtaataactttgctgatatcatcagtatgatgtactaccgaatgccaaaacgcgtagatagccggatctaagtcattgatatgtataactgaggcgtattcgtggaacatgagctccagagcaacaccagctccacccgcgtagggttctgcgtaatgaccatcatgcaagccgttcacttcaaaaacttgcttaatgaagtgagcaaattttcccttaccaccagggtagcgtagcggtgtggaaaataccctagaagcgcccatgaatcttatcccagcttgtcaagctgtacatgagaacacatgctagggcattttccaatgcttagcgccagatggcttcaagcataggttggtattcttccgcaatgtccttcagctcggatggcagcggggcgctatgagtcccgtgcacgaacaggttgaagtgatctaccgatcctggctggtcataggagctggcacgcttgaaaatggcctttgccgctgaggctgctattttcttttcagcttccaggtgtttaacgaccgactgaaccttcatgactaacttgtcaccatttcctccgccacgaagttcattgttggtatcccaacgcaaaacggtttttcctgcttctttctgcaatcttgcgtattcatcgcaagttgtttcaatgaacacgcggaaagttattgcgactgcgttagggcactcatctacccgcaagaccgcccgaagttcgttatatattgcattgatgcgggagttggagatctttagcgaccaaggcgttaagtattttctagcgcgtgcttgcggctttgcacgaatccccggtggagtttgaggctcaggttttatattttcggtgccgtccggcttgcccggctgagtcccgcccgattgagggctactggctacacctggtcgagtgccgttgccaccacctggctgcacgttagtacctttttcatcgccagagccaccgttgccaccagcgctgtgaccgccccctgtgcccccaccattcgtcgtgtctggccgagccggtctggcctttacctttgcggcttctgccaaactgtcgggcagtatttcaggtggaatatgcccaagggtaactacctggttctcatacttacgcacgtcgttcacgttgtatccatgggatacaaacatatcgagcatgaactccagcgcgggcgcgatctggtcgagtggcagctgtggtgtcaggattttattttcgacttttaaccggaaggtgttctgcccaagcgtagacgagaagatccgcgtaagggtcgttacgtcgatctcgaagacgtccagagccgccttgttcgtgaagatgtgctggttgtcgacgatcaggtttctgatctggcggccaatagattcaatgccagtctggcgtgcccggcgttcgtctcgaatgtcactgtcccagccaacccgtcctgccccccgattctcacccgtatgctttagctcaatccatacatccccgtcagcgcgggtagacactacgctgcattgaaggctttcaggcaccccatccgtcaaattatgatgggctttcagaaagcctttatagccgcgatctgcaggacaaaggtcgggacgctgaaggagcttaagggctgtaagccggcgatttccttcaaggactataaagttgccgtcttcgtccggtgtcacaagctgcagctctgtagggtcgagaccgttttcaacaatatgttcagccaggcgaagaattttcttggcttcctccggattggagagcatcagcttgatagcttcacgctgattctgggcgacatcgttgccgaatcgcacgttctcctggtcgagcttaatttgatccagggagataacgcgtatatcccgcatcattgcgtcaattttcataaattatccattcggcgattcggtgctggcgcaatgataatacaaagcgcgggcataggagggtcgccgtttcttggtctagccgccctttgtagctggcggcgacgcaggagcggtatacaccgatttccccctccaagttggtaacatttagcattgagattaaaaggaaaggagcagaaaggtgcgcccaaataatgccaatttcagtgaaatcacggtgcgatttggaaaaccctgctgccttcaatgaagcgatggcgcatgtcgctcatcgccgcttccgcccgaaccgttgagcagaccggcgaccacgagctccgatgaggcttcagagattttccgcaataagctcgtctgaggtgaacgctgcacggtgatttagatgttccctcgcacacgcgaggtgggcgcattgtgacgagccatctaaatacaacaccagagttgtatttaattagctatggccacatgatcgtcaaccggaaacaatcactagatttcacgggcagttgaccggtgatccgaccggacggacagtacacgaacggacactttacataccactgtacggaccggacacatggttgacgggtgtacggggacatggtggacacttttcggcggataaacttcgccgggaaatcatcatgccttgggacacgagagataccatgagcctgaa

SEQ ID NO: 57 - DNA, 54555 bp, Pseudomonas nodulensis
  misc_feature (21059)..(21095): n is a, c, g, or t
  misc_feature (38593)..(38658): n is a, c, g, or t
aagtgctcgatggccgtcaattttccacattcaaggaagcccaaatagcatttgatcgatggcgtgaggtgtacaacttgcagcgccctcatcaagcgttggattacaaggtacctatggaccgataccgtgccagtccctgggcttatccgcagcaactatcggattttgagtatggaccagacgatgtgctggccaaggtttatcacagccgatttcgctttcagaaacgctacttcagcatcgctaaaggcttggttggccatcacatcgcaatacggccgaaccctgaaaagagcgggttctttgatgtctacttctgccatcactttctaagaacgttcgacgtgagcaaacctgactatggttaagaatgtgtccaccatgtccccgcacatgtgtccaccatgtgtccggtccatacaataccacataatggttcaagtccgtgtgggcccaccaaacaagaaagccgcgcattgcgcggcttttgtgtgtctggcaacctcacttcgcaaacaactgcccaatatccttgaacgccttgaactccagcgcgttcccgcacggatcaaacagaaacaacgtcgcctgctcccccacctgccccttgaaccgaatatgcggttccagcacgaagcgggtttgccgggcctgcaagcgttcggccaaggcgtgccaatcttcccagcccagcaccacgccaaagtgcggcacgggcacgttgtggccgtcgacggcgttggtgtgggctgattcctgggaggcggttttcgggtgttcgtgaatgaccaattgatggccgaagaagttgaagtcgacccaatgatcgcttgagcgtccttcttcaaggccaaagacttcaccgtagaaatgccgcgcagcggccaggtcgtataccgggattgccaggtggaaaggggcgagtgtcatcaggtcaaacctctatgggcgttaagtgccccgagtttagccttgctgccaacgatgaaaagacgatagtttttgcatcgagctcaaattatttcgatcaatcgagacgcccatgctgcgtgaactgaagacctttatcgccgtaacccgccacggcacgtttgcggcagcgggcatgcatatcgggctgacgcagtcggcggtgagtgcgcagattcgtcagttggagcaggcgctcggtgtgtcgctgttcgaccgtaccgggcgccaggctacgttgaatgctgcgggattgcgcgccttgccactggcgagagagatcctggagaccttcaaccgcatggcggtgccggtggatgcaaatgagtaccggggtgagttgaaggtgggcgccatcaccactgcacaaaccggtttgttgccccaggcactggtgcgtttgcgtcaggcggcgccgacggtggagtgcaagctgatacctggcgtgtccctggagctgctgagccaggtggacgccggtgagctggactcggcgatcatcatccgcccgcccttcgacctgcccaaggagctgcacgtgcaggtgctgcgcaaggagccgttcgcgctgatcgtgcctcacacgttggcgggtgatgacccgttgcagttgctggcgacgcagccccatgtgcgctatgaccgcgcttcctttggcggtcgcctggtcagccgattcctgaaggaacataaactcgacgtgcgggtagcattggaattggatgagctggaagccatcgtcaagatggtcgaatgcggcctgggcgtatcgctgattcctcaggccgggttgtggctggaacgctcgcccaacgtgcgaatcatcccattgggcagccggaccttttaccgcgaaatcatcctgctgagccgctacagtcaacgccacctgcccgtaccgcaactgttcacccgctgcctgctcgccgacgccaacctgtaagatgccaacacactgcccccccgcatcggagccctcgccttgcccgccctagatgaaatcgaccgccaactgatcgccgccctgcagatcaacgcccgcgaaagcgtggccatgctcgctcggcagttgggtatcgcgcgcaccacggtgacgtcacgcctggcacgcctggagaaaacccaggtgatcaccggttatggcgtgcgcctcgggcagcgggtggtcgatggtggtttgcaggcttatgtgggcattaccgtacaagcgcgctcgggcaaagaagtgttgcgccggttgagtgccatggcccaggtgcagcagttgtgcgcggtgagtggcgagtttgattatgtggcctggctgcgcacggattcgccggagcagttggaccaattgctcgaccagattggcagcgtcgacggcgtggaaaaaaccaccacatcgatcatcctcagtaacaaactggatcgcggccaaccaatctgaccaacagcttcgtcattctgactaaaaacagatcaatccgacgacactttgcgtcttattaacgaacgctacactccctaaactggctgccatcatttcctatactcagcgggtcgtgccccgccgagtcatcagccaggtcagccatgaacacgtccaacaaaagcaatcgccaccctgcagacggtaaaaaacccatcaccatcttcggcccggacttcccgttcgcctttgatgactggatcgaacaccccgccggcctgggcagcatccccgccgcccaccacggcgccgaagtggcgatcgtcggcgccggcatcgcgggtctggtggccgcctacgaactgatgaagctgggcctcaagccggtggtgtacgaagcctcgaaaatgggcggccgcctgcgctctcaggcctttgaaggcgccgaaggtatcatcgccgagttgggcggcatgcgctttccggtgtcgtcgacggcgttctaccactatgtggacaagctcggcctggaaaccaaacctttccccaatccgctgaccccggcctccggcagcacggtcatcgaccttgaaggccagacccactacgcgcaaaagctctccgacttgccggtactgttccaggaagtcgcggacgcctgggccgatgcgctggaagccggttcgcagttcggtgatatccagcaggccatccgcgaccgcgacgtgccgcgcctcaaggagctgtggaacaagctggtgccgctgtgggacgaccgcaccttctacgacttcgtcgccacctccaaggcgttcgccaagctgtcgttcctgcaccgtgaagtcttcggccaggtgggtttcggcaccggcggctgggactcggatttccccaactcgatgctggaaatcttccgcgtggtgatgaccaactgcgacgaccaccaacacctggtggtcggcggcgtggcccaggtgcccatgggcatctggcgccatgtgccgcagcgttgcgcccactggccggccggcaccagcctgagttcactgcatcgcggcgcgccacgcgcgggcgtcaaacgcattgcccacgccgccgatggccgtttcgccgtcaccgacaactatggcgacacccgtgaatacgccgccgtgctgaccacctgccagagctggctgctgaccacccagatcgaatgcgacgaaagcctgttctcgcaaaaaatgtggatggccctggaccgcacgcgctacatgcagtcatcaaaaactttcgtgatggtcgaccgcccgttctggaaagacaaagacccggaaaccggccgcgacctgatgagcatgaccctcaccgaccgcctgacccggggcacctacctgttcgataacggcgacgacaagccgggggtgatctgcctctcgtactcgtggatgagcgacgccctgaaaatgctgccgcagcccatcgacaagcgggtgaagctggccctcgatgcgctgaaaaagatctacccgaaggtcgatatcaaggcgcgcatcattggcgatccaatcaccgtgtcctgggaagccgacccgcacttcctcggggccttcaagggcgcgttgccgggtcactatcgctacaaccagcgcatgtacgcgcacttcatgcagaaggacatgcccgccgaacagcgtgggatttttatcgccggtgacgatgtgtcctggacgccggcctgggtcgaaggcgccgtgcaaacctcactgaacgcggtgtggggcatcatgacccacttcggcggcagcactcacccggagaacccggggccaggtgatgtgttcgatgaaatcgggccgatcgccctggcggattaaggagttgaacatgcgtgtcgccctgtaccaatgcccgccgctgccgctggatgtggccggcaacctcaagcgcctgcatcaactggcgcatgaggcctccgatgccgatgtgctggtgctgccggagatgttcctcagcggctacaacatcggtgccgaagccgttggcgccttggccgaggcgcaagacgggccgtcggcgcaggccattgccgaactggccagaagcgccgggctggcgattctatacggctatcctgagcgggccgcagatggtcagatctacaacgccgtgcagttgatcgacgcccacggccggcgcctgtgcaactaccgcaagacccatctgtttggcgacctggaccattcgatgttcagcgccggtgacgatgatttcccactggtagaactcaacggctggaagctcggtttcctgatctgctatgacctggagttcccggaaaacacccggcgcctggccctggctggcgctgagctgatcctggtgcccactgccaacatggtgccgttcgattttgtcgccgatgtcaccgtgcgggcgcgagcctttgaaaaccagtgttatgtggcctacgccaattactgcgggcatgaaggcgagatccagtactgcgggcagagcagcattgccgcgccgaatggacagcgcattgcccaggccggcctggatgaagccttgatcgtcggtacgctggagcgccaatcgctccttgacgcccgcagcgccaatcactacctgcaagaccgccgccccgagttgtacggcgcgctgcacaagccctgatccagccggtttgttagcataggcacattctatgtttcggaagtgcccatgcctgcgccggccccccctcatcaccttcacctgaccctggccaatggcctgcgggtttccttgcgtcatgccccacggttgaagcgctgcgccgccgtgctgagcgtggcggccggcagccatgatgtgccgttggcgtggccggggctggcgcacttcctggagcatttgctgtttctcgggacagagcgttttcccacggatgacgggttgatggcctacgtgcaacgccatgggggccaggtcaatgccagcacccgtgagcgcaccacggacttcttctttgaactgccggatgccacttttgccgggggcctggagcgcttggccgacatgctgacccatccgcgcctggcgctggaggatcaattgcgtgagcgtgaggtgctgcacgcggaatttatcgcctggtcccaagatgcacaggcgcaacaacaagtcgcactgttggaaggtttggcggtgaatcatccgctacgtggctttcatgcaggcaaccgcgacagcctgccagttgagcgagagacctttcagcaagccttgcaggaatttcacacgcagttctatcagagcgggcagatgaccttgagcctggccggcccacaatcgctggaggcactggaaaccttggcacagcggttcagtgaacagctgacttcagggcttctgcgcccgcaatccgtgcccccggccttgatgccggggcaagcgcagcactatcagcacattgccaatgatcatctgcaccaggtcatcacctgtgatgcgccccgtgaagcgctggagtttctctgcacctggcttaacgcgtcggcacccggcggattgctggccgaactgaaagcgcgacacttggcgagcgcactgcaggcgtcggtgctgtatcacttcgccgggcaagcagtgctggatatcgacattacgctcagtggtcccgctgaatcagccacacaagtcgaggcgttgctgtacgactggctgagctttttcgcacacagcgactgggctgcgttgcgcgaagcgtttgctctgctggccgctcgccaacagcaaacccaagacgccctggcattggcccgaaatgaccgccaggacctgtcggaacaggatgccgtcgcccttgaggccctgcttgaatcgctgcgcttgccaccctccgaacacccatggcaactgccgccgaataaccctttcctgcgcccgccggtgaaggaagaacgcgccggcctgattcgcggccagaccagcgcccaccgaggcttgcgcacgtttgcccaggatcgctcccgagggcgtcgtgatgcatcggcactggccttcagccaggcattggcggacgacagccacgaaggcgcgttgtatctgcaatggcaatcagctccgccacatcaggaaagcgcgttgcagtcgttgcgcgacaatgcccgccaggcgggtgtcgaagtgtcgttcgaaaacctgggcagtcactggctggtgaaaatggtcgggctacaggagccgatcccagcagttctggaagtgctggcgcaacgcctgggcgatccgcaagaggcacaagccgccgcgccgcccatgatcgccatccgcgaattgctcaaggcgctgcccgcttgctgcgccacgaccacgtccgaaacagccgcgtgggacaccgcacgttggcaaggcctggggctgggtttctctaccgcccatgaagccgcgatcaaaaccgctgcggcccgcctgccggggcaacctgcaagcctcaatcatgtcgcgccatccctcagcggccaacgtatttggcatgaagtagaagccgactcaaacgaagccgccctgctgctgttttgtccaacaccacgccaatccttggcggacgaagccgcctggcgactgctcggccatctgctccaggcgccgttctaccagcgcctgcgggtagagctgcaaatcggctacgccgtgttcagcggtatccgacagataaacggccagaccggcctgctgttcggcgtgcaatcgcctagcctgtccctgtcaggcattgccgatcacctgcacaccttcctgaagcaactgccagtactgatcgatagccgcgacgacttgggcaacctggccttggccgagcagttcagcgcacagacactgcccaacgcccaagccgccgaacttctgtggcacgcccatctggcaggccatccgtcggactacctggctcaacttcaaacccagatcagaacctgtacccgcgcagaattgcagcgtgccgccgagcagttgaacgacgccgcaggcggctggcgctgcgtggccaacggaccgcgcatctcgactacgtggcaagcggcagggtgatcattgccgcccctgcaaaaggctttctccctcaagacagcgctaacttgaaaagaattgagtaatattcccacgcacacatctgaacatctccgactggaggtggactatatgtattacttggtagtaaacgtcccatcccttcgtaggagtaagaatatgacctggtccaaacctgcttacactgatctgcgcatcggtttcgaagtcaccatgtacttcgccagccgttaattcgctgggtactacaacgcctcggtttgcccggggcgtttttgttttgagcttgatggagctgccatgtttgtccagattctaggttccgccgccggcggtggtttcccgcagtggaactgcaactgcgtgaactgcgcgggttttcgtgatggcagcctgcgggcccaggcgcgcacccagtcgtccatcgcgatctccgacgatggcgtgaattgggtactgtgcaacgcctcgccggatatccgcgcgcaactccagggctttgcaccgatgcaacccggccgcgccctgcgcgataccggcatcagcgcgatcatcctgatggacagccagatcgaccacaccaccggcctattgagcctgcgcgaaggctgcccgcaccaggtgtggtgcaccgacatggtccatgaagacctcagcaccggtttcccgctgttcaccatgctcacccactggaacggtggcctggcctggaaccgtatcgagctggacgccagcttcaccatcccggcctgccccaacctgcgcttcaccccgctgccgttgcgcagcgcagcgccgccttactcgccacaccgcttcgacccgcacccgggcgacaacattggcctgatcgtcgaagacctgcgcactggcggcaaactgttctacgccccgggcctgggcaaggtcgacgcgccattgctggagatcatggccggcagcgactgcctgctggtggacggcacgatgtgggatgacgatgaaatgcagcgccgtggcgtgggcacccgcaccggccgcgagatgggccacctggcgcaaaacggccccggcggcatgctcgaagtgctggaacagttgcccgagcagcgcaaggtgcttatccacatcaacaacaccaacccgatcctcgatgaagactcccccgagcgagcggaattggtgcggcgcaatgtcgaagtggcttacgacggcatgagcattgaattgtaggagctgacgagatgactgacacgccattgaccaccgccgaattcgaagccgccctgcgagccaagggcgccttctaccacatccaccacccgtatcacgtggcgatgtacgaaggccgcgccacccgcgagcagatccagggctgggtcgccaaccgtttctactaccaggtgaacatcccgctcaaagacgctgcgatcctggccaactgcccggaccgtgagatccgtcgcgagtggatccagcgcctgctcgaccacgatggtgcccccggtgaagacggcggcatcgaagcctggctgcgcctgggacaggcggtaggcctcgaccccgaccaactgcgctcgcaggaattggtactgcccggcgtacgattcgcggtagatgcctacgtcaacttcgcccgccgcgccagttggcaggaggccgccagcagctcgctgaccgagctgttcgcgccgcagatccaccagtcacgcctcgacagttggccgcagcattacccgtggatcgacccggccggctatgaatacttccgcacccgcctgggccaggcccgccgcgatgtggaacacgggctggcgatcaccctgcagcactacaccacccgcgaaggccaggagcgcatgctggagattctccagttcaaactcgacatcctgtggagcatgctcgatgccatgagcatggcctatgaactcaagcgcccgccgtatcacagcgtgaccgagcagcgggtgtggcataaagggatcaccctatgagctttgaccgcagcaagaaaccgacctggcgcccaggctaccgttaccagtacgagccggcgcaaaaaggccacgtgttgctctaccccgaaggcatgatcaagctcaatgacagcgctgcattgatcggtggcttgatcgacggcgagcgcgacgtggcggccatcatcgccgagctggagaaacaatttcctggtgtgcctgagctcggtgaagatatcgagcaattcatggaggtcgcccgtgctgagcactggatcacccttgcctgaaaagccggccaccggcctgccgctgtggttgctggccgagctgacgtaccgctgcccgttgcagtgcccgtactgctccaatccgttggactttgccgagcagggcaaggagctgacgaccgagcagtggttcaaggtgtttcgcgaagcccgcgagatgggggccgcgcagctggggttttccggcggtgagccgctggtgcgccaggacctggccgagttgatcgctgaagcacgcaaactggggttctataccaacctgatcacctccggcatcgggttgaccgagcagaagatcagcgacttcaagaaggccggtctggaccatatccagatcagtttccaggccagcgacgaacaggtgaataacctgctggccggctcgaaaaaagcctttgcgcagaaattggagatggcccgtgcggtgaaggcccacggctacccgatggtgctcaacttcgtgacccatcggcacaacatcgacaagatcgaccgcatcatcgagctgtgcattgcgctggaggcggactttgtcgagctcgccacctgccagttctacggctgggcacagctcaatcgggtgggcttgttgccgactcggcaacaattggtgcgcgccgaacgcatcaccaacgaatatcgcgccaagctggaagcggaaggtcacccgtgcaagctgatcttcgtcactccggactactacgaagaacgcccgaaagcctgcatgaacggctggggcagtatctttctgacggtgacgccagacggcaccgccctgccctgccacggcgcccgacagatgccggtgcaatttcccaatgtgcgcgaccacagcatgcagcacatctggtacgactcgttcggcttcaaccgctttcgtggctacgactggatgcccgaaccgtgccggtcatgcgatgaaaaggaaaaggatttcggcggctgccgatgccaggccttcatgctcacgggggacgcgagcaatgccgacccggtgtgcagcaagtccgagcagcacggcatcatcctgcaagcgcgggaagaagccgaatacgccacccagaccattgagcagttggcctttcgcaacgagcgcaactcacggctcatcgcaaaaggctgacggcctcagcgcttggcgatgatgtacaccgcgtgcacgatgcccgggatgtagccgcacagggtcagcaggatattcagccagaacgcgccgccgaaacccacttgcaggaacacacccagtggcggcaacagaatagcgatgatgatacgaatgaaatccatgggatcagctccagaaaatcggctcgtgtgagccgtgtagctaatcgaccttgggcattcgtgagggttcagtgggatctggcgttgggccatccaggcaaaaaaacgcccccggccaaaagaatcaggccggaggcgctgcgtagaccgcgagacggttcaggaataagggttaaacggcgatacccttgcggcattgcagttgggcggtacgcacgcgggagaaggcgcgggccaggcgcaggagcatttcgtcgatgttgcttttgctcacggtcagggccggggtgaagcgcaggcagttgggttgcggagcttgaaggatcaggccttcgtgcagcgccgcttttacaacagcatccgcagaatcatccgacaacgtcaggccccacatcaggccgtggccacgcagttgaccgtggtcgtagcggtaggccaggcgggcaagaccttcgcccaggtacaagccggtctcacacacgtgatccataaagccgtgctccagcacggagtcgagtactgccagcccggccgacgccatcagcgcgttgccatggtgggtgccttccagctcgcccacttcgaagcaacaggccttgccgcgagccaatagcgctgcaacgggaaccccaccacccaggcctttgccgagggtgatgatgtcggcacgtacgccgtattgctgctcggcgagcaaagtgccgcagcggcccatgccggtttgcacttcgtcgaggatcagcaagatccccagttcacggcacaggcgctcgacgcccttgagatagtgctctgtcgcggggattacacccgcttcgccctggatcggctccagcaggatggcgacagtttgtgcgtcgactgccgcatgcagggccggcagatcgttgaagggcacatggctgaaacccggcaactgtggttcaaaacggttttcaagcgtacttgccgacgccgacatcgccgcaaagctacggccatggcaaccaccgctcgcgctgatgatgcgataggcgccgccgcgatgcagttggccccatttgcgcgccaacttgatcgcggcttcaacggcttccgcgccgctgttaagcaggtaagcctggtcactgccggtgcgatggcacaggcgctcggcgaggttgagttgagcgcggttatgcaagccgttgcctgggttgatcagcgcctgagtctggtcggccagtgccttgatcaacacctgcgggctgtggccgaggctgttggcggcgtttccctggctgaaatccaggtaagccctgtcatcgctgtcccacagccaggaaccctggccgcgcacgaagacttggggtggccgcgctacggagggcatcagggattcgttgggaggattatcgctgggcgtctccagaactaaatcgtccaagctcggcgcggggcgacggaacagattcatgattcacccccaatagtaatcggaccttggtcgctgcgacccgtcattattgccttgaggttttttgccttgcctatgtaaacgctatcaacataaacgctgttcattgcccgatccggccctgtaagccctgcgaataggcgctagactaggcgcctcgggggccagcggccatttcgattttccagctttttcgataagtaagtcttatggatttcaagcaactgcgttatttcgtcgcggtgtatgaggaaggccacgtaggccgtgccgccgagcgtctgtcgatctcccagccggcgctgtcccagcagattcgccagttggagcagaacctggatgtgagcctgttcgaacgcagcagcaagcgcctgctgccgacactggcggcgcatacgctgtacaaccacgccctgccattgatcgatggcatgcagcaggcggttgaggccctgcgcaacttcaagggccaggcgatgcgcacgttggccatcggcgtgctgcaaaccgtgcacaccagcctggtcccgcagatgctcgagcgcgtgcgcaaggcccagccacatttggtggtgcagatctacgaattgactggaattgagattgagcggcggctactcaacggctcgctggatatcggcatcagctacttgccgccacgccagccagggttgcacggcgtgttgttgtacgaagatgagttgaaggtggtcatcccagaagaccatcccttgcgcgaattcaagaaagtctcactgaagcaggccgccgagttgccgatgttgctgctcggggaagaattccaggtccggcagatctggcagggccaactgtccaacctcgggcggcgcccgcaagtgcaggcagagctcaataccatggcgggaattctcgatagcctgcctcataccaagctggcgacggtactgccggggcgctcccaggatgaacacaacagccaggcgctgctgtggaaacccttgagtgaacccagggtgccgctgaaagtcggtttggtatgccgcgatgtgcaacgccagcaggcgacggtggcgttgctgcgcaccttgctggaagacgtgatgaatgccccgcaggcgcctgcctgactttttcgcgggcaaaagaaaaccccgccgaagcggggctttgcagactgtttccctgacatccatttcactccgccgtcctggcagaatcctacgtgtccgtgttgttgctttgcgcttcctgcgcgacgtccatgtgaagtagattatccgtggatccaatatggcgatagaggacgaatagcagtacgtcatgtaagagaatgcttacacgccctccaagcctttagaacagggcttcatccagcaaaaacagtgattcgctaccggcttttaccgacgcactcagcgagtggatgcgcggcaacaggcgcgcaaagtagaagcgtgcagtcccgagcttgctggcgtagaagtcttcttccgactccttgcccaacgcggccttggccatgcgcgcccacatgtaggcatacgccatgtagccaaaggcatgcaggtactccaccgacgccgcgccgatctcattcgggttggtcttggcgcggtccagcacccaggcggtcaactcatccaggttatccaccgccacgcccagcggcttggtgaattcggccagctcggcccccgccgaggcaatgaacgcgcggatctcatcggcaaacagggtgtagaacgccccgccactgccgacgatcttgcgccccatcaggtccagggcctggatgccgttggtgccttcatagatctgggtgatgcgcacatcgcgcaccagctgctcctggccccactcgcgaatataaccgtggccgccaaatacctgttggcccagcacagtggtttccaggcccaggtcgctcaggaatgccttggccaccggcgtcagcaacgccaccaggttatctgcacgctcgcgggctgcggcgtcgtcgctgaacttggcgatgtccagttgcgtcgccacgtaggtggagaacgcccggccaccttcgttggcggctttcatggtcagcagcatgcgccgcacgtccgggtgcacgatgatcgggtcggccattttgtctttggcctgggcgccggtcggtgcacggctttgcaggcggtcgcgggcgtattcgatggcgttctggtaggaacgctcgccggacgccaggccctggatacccacccccagacgctcgtagttcatcatggtaaacatcgccgccaggcctcggttcggctcgcccaccaggtaaccaacggcctcgtcgaagttcattacgcaggtcgccgacgcctggatccccatcttgtgctcaatggagccgcagctcacagcgttacgggcacccaggctgccgtcggtgttcaccatgaacttcggcaccaggaacagcgaaatccccttgggccccgccggcgcgtccggcagcttggccaggaccaagtggatgatgttatcggtgaggtcgtgttcaccgccggtgataaagatcttggtcccgctgactttataggaaccgtccgcctgtggctcggccttggtgcggatcatccccaggtcggtcccggcgtgggcctcggtcaggcacatggaaccggcccactcaccggaatacatcttcggcaagtaagtggccttgagcgcttcgctggcgtgggtgttgatcgacacacaggcgccagacgtcagcatcgggtacaggccaaaggccaggctcgacgagttgatcatctcttcgacctgggccgacacggccttgggcatgcccatgccgccgaacgcaggatcaccaccgacacccacccagccgccttcagcataggttttgtaggcctgtgggaaaccgtccggggtaaacacggcggtgttgtcccaacggcaaccttgttcatcgccaccacggctgagcggggcgatggatttggcggtgaccttgccggcttcttcgaggatggcctctacggtttcggcgtcaacggtgtctgccaatgccggcaactgggcccaagtggtggcgacctcaaagacttcgttgaggacgaagcgcatatcacgcagcggcgctttgtaatcagccatggcaaacctcgtgagaacgtgaaaagtaattcggtaagagtcggttttacaggctcagagtgtacccgaacaacttttcagacacatagggtccacttgtgactgattggtatttttaagtcattaccacgcaaacgcctccgcaggcagactcatcaggcattcgctgcccgcttccacggccgcgcgatgggtagccgtacgcggcagtagacgcttgaagtagaactcgcacgtggccagcttggccttggcaaaatcgccatctggctgttcaagggcagcgatcgccattcgcagccacaggtacgcgagcaccacgtaaccgctgtacatcaagtaatccaccgccgccgcgcccacttcatcggggttcttcatcgcggccatgccgaccttcgtggtcagctcaccccattccccgttcaactgattgagttgcgccacatagcccttgagctgagagtgctcggcattcgcggcacagaacttatgcacgattttggtaaacccacgcagcaacttgccctggctgcccagcaccttgcgccccagcaggtcgagggcctggatgccgttggtgccttcatagatcggcgcaatccgcgcatcgcgcgccagctgctccatgccccattcacggatgtaaccgtggccgccgaagatctgcatgccgtggttggtcacctcaaggccggtatcggtcatgaaggctttgcagatgggcgtgaggaacgccagcaggtcttcggcatcctggcgctggccggcgtcactgctcaggtgcgcggtgtcgagcaattgcgcggtgaaataggtcagtgcgcggttgccttcgttgaaggccttcatggtcagcagcatgcggcgcacatcggggtgcacgatgatcgggtcagcagctttgtctggggccttggcgccggtcagcgcgcgcatttgcaggcggtcgttggcgtatttgatcgcgccctggaaactcgcttcgccattgcacaggccctgcatgccggtgcccaggcgcgcgtggttcatcatggtgaacatgcagttgaggcccttgttcggctcgccgatcaggaagcccctggcgccatcgaagttgagtacacaggtggcggacgccttgatgcccatcttgtgttcgatggaaccacagtgcaccgcattgcgctcgcctgtgtcggcatggaacttgggcacgataaacagcgagatacccttggtgcctgccggcgcatccggcagcttggccagcaccagatggatgatattggcgctcatgtcgtgttcgccggcggagatgaagatcttgctgccggtgaccgcatagctgccgtctgcctggggcacggcacgggtcttgatcaggcccaggtcggtgccgcaatgagcttcggtgaggcacatggtgccggtccattcgcccgctgtgagcttggtcagataggtgtctttttgctcggcggtgccgtgggcgtggatcgccgacatcgcgccgtgggtcagccccgggtacatgccccaggaggtgttgctggagccgatcatctcgctcagcaccaggccgagcgactgcggcaagccctggccaccgtaggccgggtccgccgccacgccgtgccagccgccctccacgtactgggcgaaggcttccttgaagcccttgggcgtggtgaccacgccattgtcgaaatgacagccttcttcgtcgccgctgcggttgagcggcgcgagtacgttctcgcagaatttcgcgccctcttcgaggatcgcgccgaccatgtccgggctggcgtcggtggcacccaacgcggcgtagtgaccgtggaaatcaaacacgttgtcgatcagaaagcgcatgtcgcgaaggggagctttgtactcaggcatggcaatgtctccgtcagcagatggtttcaacctactgccggccaacgcctgggacaatcactgtagaaccgctgaatacaccgccatcactcaaccggcagcgctctgcatgcgcaccgcgccacgccgggtctgcccggacgccaccacgcagttacgcccggcgcccttggcggcgtacagcgcctggtcggcggacttgagcacttcctcgggggagcgctgctcggcctggcgttcggccacgccgatactgatggtcaccgagacactggaggcgccgctgcccgaacggcgctggcgaccctgttgatcgtcctgggggcggtccgaattacgcagcttgatgtcgtagtcggcgatgatctcgcggatctcctccaggtgcggcatgcattcatccagggtcttgccggcgaacaccacggcgaattcttcaccgccgtagcgataggcgcgcccgccgccgttgaccttggacagcttgctcgccaccagccgcaatacctggtcgcccacgtcatgaccatgggtgtcgttgaaacgcttgaagtggtcgacgtcgctcatcgccaacacatagttgcgccccagccgctgcatgcgctcgttcagcgcacgacgccccggcaagccggtcagctcatcgcgaaaggccatttgataagcctcgtgggccacaccggcggcgatcatcagcatcacctggctgcacatgatattcagggtgaagggcaggatgaacgtctgcggcaacatccagaacaggcccagcaaccccaccagttgcgccgcatgcagcgggcgcggctggtaccagtattgcgccgccagggtcaggaagccgatcaggaacatcgggtacgacagctggatcaggctcatccagctgccatgcagcgccggccagcggatctccgccagccagttcagcaccgcctggggataactctgctccagcgccagggccacgctgcccaccgccagcaacaccgcgccacgggctacaaagtcacgaaacaggtgggtcttctcctgccacagcgcgtagatgctgaacaacaacggcagcagcaggcagcacaggtggaacaccacggcggcgtcttcgcgcacgcggccattgtcgcggtagaagtcggtctgggtatcgagcaggaagtaggcgatgtataccgtgatcatcaggaacagttcacgctggcggcggtacaccgcgcagtacgaaccaccgagcaacagcaccagggtcggcaacacattgaacagtgaggtgaagaaaacgttgaggtccttgacgtacgcagccgagagcccggccagcaagagcagcaacgaaggtagaaaatgactgaaacgtacagcggacacgcgtgacaagggtaaaactccgacccgcaaaaaatgatggcactgtgcctctatgtggacagttaagcacaacctgacacacatgcatcacattgccatcactgtaacggcagccggcggtaatccctgagtgctgcggtgtggttttttatcgcccacaaaaaagccgccgcccccgtagaggagcggcggctctggaagtgaacccggtaaggcttagtaagccaggccgaagtcttcttctttcatgtccatcaggttgttggcacccgacagcatggtggctttgtgggccagggtacgcggcaggatgcgctggaagtagaagcgcgcggtctgcagcttggcggtgtagaacgcttcttcggtggtgccggcagccagtttctcggccgccaggcgcgccatgtcggcccagaagtaagccaggcaggcgtaaccggagtacatcaggtagtccaccgaggcggcacccacttcttcgcggtctttcatcgcggccatgccgaccttcatagtcaactcgccccactctttgttcagcgcagccagcggtgcaacgaactctttgaccgcttcgttgccttcgttggcctggcagaacttgtgcacgatcttggtgaagcccttgagcgcttcgccttgggtcatcagcactttacggcccagcaggtcgagggcctggatgccggtcgtgccttcgtacagcatcgaaatgcggctgtcgcgaacgttctgctccatgccccactcggcgatgaagccgtggccgccatagatctgcacgccgtggttggccgattcaaagccgacttcggtcatgaacgccttggcgatcggggtcatgaaggccagcaggccatcggcctgtttcttggcgtcttcgtcggtgccgtatttgacgatgtccacttgcttggcggtgaagtacaccatcgcacggttgccttcggcaaaggccttcatggtcagcagcatgcggcgcacgtcggggtgcacgatgatcgggtcggcggctttgtccggggctttcgggccggtcagggagcgcatttgcaggcgatcgcgggcatatttcaggccaccctggaagccgatttcggcgtgggacaggccttgcagcgcggtacccaggcgagcggtgttcataaaggtgaacatgcagttcaggcctttgttcgccgggccgatcaggaaaccggtggccgcgtcgaagttcatcacgcaggtggcgttgccgtggatgcccatcttgtgttccagggaaccacagctcacggcgttgcgcgcgccaatcgagccatcggcgttcggcaggaacttcggcacgatgaacagcgagatgcctttggtgccggccggtgcgtccggcaggcgggccagtacgatatggacgatgttgtcggccatgtcgtgttcaccggccgagatgaagatcttggtgccggagaccttataggaaccatccgcctgaggctcggccttggtgcgcagcatgcccaggtcggtgccgcagtgtggctcggtcaggcacatagtgccggtccattcgcccgacaccagtttggtcaggtaggcctcttgctgctcgggcgtgccgtgctcggagatagtgttcatcgcaccgtgggacaggcctgggtacatgccccacgaccagttggcggcgccgaccatttcgctcacggccaggcccagggattccggcaggccctggccgccgtgctccacgtcgtgggccaggcttggccagccgccttctacgaattgtttgtaggcttctttgaaaccggtaggggttttaacgcccgactcactccaggtgcagccttcgatgtcgcccacgcggttcagcggtgccagcacttgctcacaaaacttggcgccttcttcaaggatggcgtcaaccatgtccggggtagcgtcctggcaagccggcaggctctgatagtgcgcttcatagccaagcagttcgtcacgaacgaagcgaatatcacgcaagggggccttgtagtcaggcatagcgataaacctctgctgatgtatctggaatgaacaaccgcgtggaagtgttggggcggtcaaacaggtgtttgaaacatacgtttacgacctggggatgtcaagcgtcgtccggatgccgtttgtcatgacgcgggtcaatggcgcgcacggtaacgcttgcggctagacgccacatgactgggggagtgtagaagttcagaaggacgacacagtaaaaatgtgggagggggcttgcccccgatagnnnnnnnnnnnnnnnnnnnnnnnnnnnnnnnnnnnnnctatcgggggcaagccccctcccacattttttagcgccagcagatcaggcgtaggtgtcgatcagggtaccgagcatttcatcggaagccttggcgactttagcgccgagttccacttggaacttgccttgggccatttcaaccatgttgctggccgagttggacggctgggcgcggtcgttggcttgcagacggtcgctttgcgcgtccgatggctgagtggtcgcggcgctggcaattctgccggcggcctgatcgacacggttctgcccggactgaatgctgctcaggcccgagtaaaacgcgctgcttccagagatttccatggcgtaagcctgcctttagagaatcgtgaagttgaattgaagcagatatcccgtcaaagggctcgtcaaaaacactaatggcataatgccttgtcgatagccaaaatcagtcaagcaggtccagttgcaagtactcggcaaccgcttcagccccggcgtgcttgagtttcggcacacgccccaagaatggcgcaggcaggcgctcagccagggtggcaaggttttcttccagacgggaggtcttggggtcgatgatattcgccacccacccggccaacggcaggccatcccgggcgatggcttcggcggtcagcaaggcatggctgatgcaacccaggcgcacccccaccaccaggatcaccggcaatttcagcgccatggccaggtccgacatattcgcctggtcagccaatggcacgcgccagccaccggcgccttcgatcagggtgaaatccgcttgccgtgccaggatctgctgcatgggcttcaacaacgattgcacggtgagcgagaaacccgcctcccgcgccgccagatggggtgcgatggccggttcgaacgccaccggattgacctcggcataactcaacggcagcgagcattcggacagcaacgccaacgcatcggcgttgcgcaagcccttgggcgtgacctggcaaccggaggccaccggcttacccgccgcggtgcttctgccggcttgccgcgccgcgtgcaacagaccggcggcgatggtggttttgccgacatcggtgtcggtgccggtgatgaagtaggcggcgctcatagaggtttctccagtacggcatacaccacttggtaagtcgccggcaggccttgggcctggcggaaccgctcatacgcgtgcaccagtgcaacaatccgcgcgcgccccgtcaacccaccggggcgaccggggttgaggttatgcgcgcccagggccttcaattcgtgggtcaggctgcgcacatccgggtaatgcaacacatgaggacggcgctccaggctcaccacccgcaggccgctggccgcacacacttgttgatacgcctcgaaggtgcggaagcgattgacatgcaccaggccatccgccgcacgccagctctcgcgcagctcttccagggtgcccgtgcagagactggcgaaggccagcacaccgcccggttgcaacacccgatgggcctcgctgagtaccgcctcgaaattcgcacaccactgcaccgcgagggacgagaagatcagctgcacgctgtcagctttgagcggcaagcgttcggcgtcgccggcgatgaagtgctcggcgccacccagggggcgtgcgtggttgagcatgccttcggcgatgtccaacgcgatgccttggctggcgggccagcgctcccccagcacacggctgaaataaccggtgccgcagcccatgtccaaccaacgttgcggcgcggtatcggccggtaagcgcgccagcaattggcagcccaccgcccgctgcaactcggcgacgctgtcgtaactggcggcggcacgggaaaaggacgccgccacctggcgcttgtccggcaacgcacccggcagcggggcgtgggataaatcagtcatcgacgcactcatgcaaaaaagcctggatggcccccgctacaccgtgagggtcttccagaagaaaagcgtggccggcctgttcaatcaggccgatttcaacatccggcagcagggccagcaggtcgctggcggcttcggcgggcaccaacccatccaggccggcgaacaggtgcaactgcgggccgcgataggccaataaggcttcacgggtatccaactgggcgagtagctcaaggccgggcatcaacacactgggcggcgtgttcggcgcgctactgaccagcaggcgcgacagcccgcgcgggtcttcggcacccttggcgcacaacaaaccgaagcgtttgagggtgacttgggagtcggcatggcagccggcgaggaatgcatcgaaggtctcggcgggcatcgcgcttggccagccagcgtgggcgacgaaacacgggttactcgccagcgtcagcaggccgcagcaacgttcgccgcgccgcgccgccagttccgaggccagcatgccgcccagggaccagccgcccagccaggcgttgtccggcagcgtagcgtcgagttcgtcgagccactcgttcaggtcgctggagtccagtgcaggcaacggttcgatctgcacctgcaggtgctcgtccaaaccttgcaaggcggcggccaacggctccagcggcgatacaccgaggccccagccgggcagtaatatcagtcgatcacgcatggcctcgctccgaactgcctaacaagcggaaacacgcttccaatgcgtttaacaatagctgcacctgcgccgcgctgtgggctgccgtcaatgtcacgcgcagacgcgcgctgccggcgggcacggtgggtgggcggatcgccgtcaccatcaggccgcgttcacgcagcatctgcgacaggcgcacggccttggcgctgtcgccgatcaggatgggttggatcggcgtaaagctgtccatcagctccagcccaatctgctcggcgccctggcggaactggcggatcaggcggttgaggtgctcgcgccgccaatgttcgctgcgcaacagttccaggcttttcaaggtggcacaggccagggcgggcggttggctggtggtgtagatgtacgggcgggcgaactggatcaggctttcgatcagctcttcactgccggccacaaatgccccggccgtgccgaacgccttgccgagggtgccgaccagcaccggcacgtcctcctggctcaggccgaaatgctcgacgatcccgccgccgttggcgcccagggggccaaagccatgggcgtcatctaccatcaaccaggcgcctttggccttggtttcgcgggccagcgcgggcaggtcggccaggtcgccgtccatgctgaatacaccatcggtgaccactagggtattgccggtagctttctccaggcgcttggccaggctctgcacatcgttatgcaggtaacgattgaaacgcgcacccgagagcaagcccgcatccagcagcgacgcatggttgagacggtcttccagcaccgtatcgccctgccccaccaatgccgtgaccgcgccgaggttggccatgtagccggtggtaaacagcagcgcacgcgggcgaccggtgaggtcggccagggcttcttccagttcatggtgtggcgtggcatgcccgaccaccaggtgcgaagcgccgccgcccacaccccaacgcgaggcaccggcgcgccaggcctcgatcacctgcgggtgattggccaggcccaggtaatcgttattgcagaacgccagcagcggctggccgtccaccaccacttccgggccctgggggctgtcgagtagcgggcgttggcgataaaggtgttcggcacggcgggcagcgagacgcgcggcgagatcgaaagacatgcaggcctcgattaaacagatgtaggcggtcaagaatgtggcggggatccagtgtgggagggggcttgcccccgattgcaatctgtcagttgatgcaggtgtcgactgacccatcgctatcgggggcaagccccctcccacaccagccgtttcccacaggtggctggcatttcaatcaaacaacggcgttatagaactgctcgctgctcttctgctccaccaacgcctgctcgattgcggcctggtgcacttcatcggcatgttcttcacgggcttccggcaggatgcccaggcgcgcaaacagttgcatgtccttgtcagcctgcgggttggcggtggtcagcaacttgtcgccgtagaagatcgagttggcaccggcaaagaacgccaacgcctgcatctgctcgttcatcgcttcacggccggccgacaggcgcacatgggacttcggcatcaggatgcgcgccacggcgagcatgcggatgaagtcgaacgggtcgatgtcttcggcgttttccagcggcgtacccgccactttcaccagcatgttgatcggcaccgactccggatgctccggcaggttggccagttggatcagcaaattggcgcggtcgtcgagggactcgcccatgccgaggatgccgccggagcagatcttcatccccgaatcacgtacataggccagggtttgcaggcgctcgctgtaggtgcgggtggtgatgatgctgccgtagaactccggcgaggtgtcgaggttgtggttgtaatagtccaggccggcctgggccagggcttcggtctggtcctggtcgaggcggccgagggtcatgcaggtttccaggcccatggcctttacgcctttgaccatctgcaacacgtagggcatgtctttggccgacgggtgtttccaggcggcacccatgcagaagcgcgtcgagccgatggctttggcgcgggcagcctcttcgaggaccttctgcacttccatcagcttctctttttccaggccggtgttgtagtggcccgactgcggacaatatttgcaatcttccgggcaggcgccggtcttgatcgagagcagcgtcgacacttgcacacggttggcgtcgaaatgcgcgcggtgcacggtctgcgcctggaacagcaggtcattgaacggctgcacgaacagcgctttgacttcggcgagggaccaatcgtgacgcaaggtggcggtggtgctggcgctcatgggcgattccttgattatgctttggcaagcgctgcgggaagggcaatacccacaggcacgacacggatgctcggcatatttaaggaagattcatgcactgtcaaccgagacacaaacaccaggtttacatctggttaaataacatacaaacctgtttaatctgtgatgaagcgacacaatccgcccattgtgtgtgcaacgtctgcgaaaccgagctgccctggctcatggagcactgcgatgtgtgtgccctgcccctgccgatggagggtttgacttgcgggcaatgccaaaaaaatccccctgcgtttaaacaggtcatcgccccctggtcctacagctttcccatcgacagcctgatcagccgcttcaagcatcaggcacgctggcccctcgggcagatgctggcgtggctgttggcgcaacacctgcaacatcgcttcgataacaccggactcccccgccccgactgcctgctaccggtgcccatggcccgcaagcgcctgcgcgaacgcggctacaaccaggcgttaatgttggcacgctggctcagcagcgacttgaacattccccacgatgaacagctgttgttacgcccccatgaaaccgtggcccagcaggcactcgacgccaggacccgtaaacgcaacctgctcggtgccttcgccctggcgccccacgcccaggtgcagggccgccacttcgccctggtcgacgacgtgctgacgaccggcgccacggcccatagcctggcgcggttattgatgaacgccggtgcgaagcaggtcgatgtgtattgcctggcccgcacacccaaaccgggcagttgacttgactccagcccaccttgcccgcaacgttcggctcatcccagccaagcgtatccacatgtctctgccaacctccctcagccaacacatcatccgccgcccccagcgcattgccttactggcacatatcgccgagcagggttccatcacccgtgcggccaaaagcgcaggcttgagttacaaggcggcgtgggatgccatcgacgagctgaacaacctggcacaaaagccgttggtggaacgcagcgtgggcggcaagggcggtggtggcgcgaagctgacggccgaaggtgagcgcgtgctgcgtctttaccagcgcctgcaagtgctgcaagccgaagtgctgggttccgatgaagccgccagcgacttcaacctgctcggccgcttgatgctgcgcaccagcgcgcgcaaccagctgcatggccaggtgatcgccatcgagcagcagggccgtaacgacctgatccgcctgcaactggccggtggcctgagcctggacgcgcagatcacccatgacagcacgcaacgcctggaactggaaaccggcgtggaagtggtggcgctgatcaaggccggctggctggaagtgctcgcatccgagcaagctgcaacacctggacacaattgcatgagcggcaccgtcgacgtcattctcgacgccgacgacggccccagcgaagtgcgcattgccctgcccaatggccaggttttatgcgccctggcgcggcccgaggcactcaaggacgtgggcgccgccgaaggtaaaaccatcaccgtgcaattcgcgccaagcaatgtgctgctcggtacgccggtgtaggcgcagcccgccttcaaactgcaacaatttcgtcacgcccgctccttatggtgtctgcaaaaaccgcagggagcctgagatgagcctattagaagaaaaccaagccaccgacctggaacagatggtcggcctcacccgccgccgctttatcggcgccggtgcgctgtgcggtgccgcgatgttcctcggcggcaacctgctgagccgcagcgccctggccgtcaacgccgccagcgccagcccactgctgggctttaccagcatcgccgccgccaccagtgacgccatcaccttgccgccaggctacagcgcctcggtgctgatcagttggggccaaccgctgagcaagaacgcacccgccttcgacccgtccggcaacggcacggccaaggcccaggagcagcagttcggtgacaacaacgacggcatgagcctgttcgccttcccgggcgacgacaaccgtgcgctgatggcgatcaacaacgaatacaccaattaccgctacctcttcgcccacggcggcgcgccgcaatcggccgaagacgtgcgcaaggcccaggccagcgaaggcgtgtcggtgatcgaagtgcggcgcaagggcgacacctggcagttcgtgcaggactcgcgctacaaccggcgcatccacggcaactcgccgatcaatctcagcggccccgccgccggccacgcctggctgaaaaccagcgccgacaaaaccggcaagaaggccctcggcactttccagaactgcgccaacggcaagacaccgtggggcacctatctgacgtgcgaagagaacttcaccgactgttttggcagcagcaacccacaacaaaccttcgacgccgggcagaaacgctacggggtggtagccgccagcaaagacatcaactggcacccgcacgacccgcgcttcgacatcgccaagaaccccaacgagctcaaccgccacggttgggtggtggaaatcgacccgttcgaccccaagtccacccccgtcaaacgcaccgccctgggccgcttcaagcatgaaaacgccgccctggctgaaacccgtgacggccgcgctgtggtgtacatgggcgacgacgaacgcggcgagttcatctacaagttcgtcagccgcgacccgatcaaccaccacaaccccaaggccaacaaggacctgctcgaccacggcactttgtacgtggcgatcttcgatgcgggcgacagcaacgccgatcaccccaagggcaagggccaatgggtcgagctcagccacggcaagaacggcatcgacgccagcagcggcttcgccagccaggccgaagtgctgatccacgcgcgcctggccgccagtgtggtgaaagccacgcgcatggaccgcccggaatggatcgtggtcagccccaccgatggccaggtctattgcaccctcaccaacaatgccaagcgcggtgaagacggccagccggtgggcggccccaacccgcgtgagaaaaacgtctacggccagatcctgcgctggaaggccgacgcggataaccacggttccacggaattcagctgggacctgtttgtggtggccggcaacccgggcgtgcacgctggcacgccaaagggtggctcgtcgaacatcaacccgcagaacatgttcaacagccccgatggattgggtttcgacaaggccgggcgcttgtggattctcaccgatggcgactacagcaacgcgggtgacttcgcgggcatgggcaataaccagatgctctgcgccgacccgtccaccggggaaattcgccgtttcatggttgggccggtggcctgtgaggtgacaggcatcagcttctcgccggatcagaagacgttgtttgtggggatccaacacccaggcgaaaccggcggatcgacctggccggagcatctgccgaatggcaagccgcggtcgtcggtgatggcgattcggcgggatgacggcggtatcgtcggcgcctgacaaagcctcatcgggggcaagccccctcccacattgattgcattcacatattttgacttgtgaacacagtcagtgtgggagggggcttgcccccgatagcaatggcacagtcaccacctatctcagccccggtgcgttaccatacccggccggacgcggcgccctgctgcgcgcaggagttcgcatggcccacccgtttgaaacactcacccccgacctggtcctcgacgctgtcgaaagcatcggtttcctcagcgatgcgcgcgtattggcgctcaacagctacgaaaaccgcgtctaccaagtgggcatcgaagactccgagccgctgatcgccaagttctatcgcccgcagcgctggaccaacgaggcgatccttgaagaacaccgcttcaccttcgaactggccgaatgcgaagtgccggtggtggcaccgctgatccacaacggcgaaagcctgttcgaacatgccggcttccgcttcaccctgttcccgcgccgtggcggccgtgcgccggaaccgggcaacctcgaccaactctatcgcctcgggcaactgctcggccgtttgcatgcggtgggctcgacccgcccgttcgaacaccgtgaagccctgggcgtgaagaacttcggacacgactccctcaccaccttgctggaaggcaatttcatccccaaaagcctgctgccggcctacgagtccgtggcccgcgacctgctcaagcgcgtggaagaggtgtacaaggccacgccgcacaagaacatccgcatgcacggcgattgccaccccggcaacatgatgtgccgcgacgagatgttccacatcgtcgacctggatgactgccgcatgggcccggcggttcaggacctgtggatgatgctcgccggcgaccgtcaggaatgcctggggcaactgtcggagttgatggacggctatcaggagttccacgacttcgacccgcgtgaactggcgctgatcgaacccctgcgcgccttgcgcctgatgcattacagcgcctggctggcacggcgctgggatgacccggcgttcccccatagtttcccgtggtttggcagtgagcggtattggggcgatcaggtgttggccttgcgcgaacagctctcggcgttgaatgaagagccactgaagctgttttgactgacaaatatccttacaatcgcgctttgttagctgcctaagcaaggatttcgcaatgcaagccgccaacccccgcaaggggtacatcctgggcctgagcgcctatgtcatctggggtctgttcccgctctacttcaaagccatcgccagcgtgcccgccgccgaaatcatcgtgcaccgcgtgctgtggtcggcgctgttcggcggtttgctgttgatggtctggaaacatcccggctggttccgcgaattgcgtgacaaccccaagcgcctggcgatcctggcccttagcggctcgttgatcgcgggtaactggctgacctacgtgtggtcggtgaacaccgggcgcatgctggaagcgagcctgggttactacatcaacccgttggtgaatgtggtgctgggcatgttgatcctgggtgaacgcctgcgccgtttgcagtgggtcgccgtcgggctggctgcggtgggtgtggcgcagcaggtgtggcaggtgggcagcttgccgtgggtgtcgctggtactggcgttgacctttggtttctacgggctgatccgcaagcaggcaccggtgaaggcgctgccagggctggtggtggaaacttggatgctggtgccgattgcggttgcatggctgctgttcaatccgaccgcccacagtgcgcagatggaattctggggcacctccgaagcctggtggctggtagccgccggcccggtgacactgatcccgctggtgtgtttcaacgccgccgcacggcatttgccctataccgccctgggctttttgcagtacgtcgcgccgaccctggtattgctggaagccgtgctgctgttcggcgagcatctggcaccaagcaccttgaccgccttcgcgttcatctgggcgggcctggtggtgtacagcgtggatatctggctcagcgcacgcaaacgttgatcaaataacgtacaaacctctgcaagccataatctacgtggcttgcagacatccaccccaaggttatccacaacctgatccccgccatttgtgcacaagcccttgaaactgctcgttttttgctcaagtagcgaagaaccccgcacggcgtggcctggcgccgggtctctacaggttatccacaggcccatgcaagatttccatgcataaccctgtgggcagattattcctcgtggtgcagctccaccatcagatcatcggccagggtttccagggacaattgcaaagtatccagggataacgctgccggcacctgcaacagcgcttcagcggtgaacagcgggtcaccgctcatgggcgccgggcgcacgtccgtgctcaggctctccaggttcacgccctgcttgctcagcagcgccgtgatctcgcgcacaatgcccgcacggtcattgcccaccagcgtcatcatgatcgacttggaggccgaggcctgcccgctgctgccctcacccaccagcacgcgaatgccgtgtgtggataagtcctccagcgcaccgaccagcgcctgacggttctccgtaggaacgccgacgcgcaggatcccggcaaattgcccggccatgtgcgccatgcggctttccagccagttgccaccgtgggcggcgatgttctgtgcgatgcgctcgaccagaccgggtttgtcggcggcgataattgtgagtacaagatggtccatggcaaagccctctgaattcaatctacaaggtggactcggaagccctcgaaaacaaatcgtgtaccatttttatatttatctggaacaatccaatagttttttgagaacatctggttctccgctgtgaccgtacgaccaaagtgggtcgctaaacgacgtatttagtctaattttcacaaccgcaagtcatcatgtagtatgcccaaccgtgcactacataatgaaaatctgaaaaagcgcataagctccgcagagtgaggcaagcaatgactgaacacgttcaagtcggtggcctgcaggtcgccaaagtcctgttcgacttcgtgaacaacgaagccattcccggtaccggcatcactgccgaccagttctgggccggtgccgacaaggtcatccacgacctggcaccgaagaacaaagccctactcgccaaacgcgacgatttccaagcgcggatcgatacctggcaccagactcacgcaggccaggcgcacgacccggtggcttacaaagccttcctgcaagacattggatacctgctgccagaagccgcggatttccaggccacgacccaaaacgtcgatgacgagatcgcccgcatggccggcccgcagctggtggtgccggtgatgaacgcgcgcttcgccctcaacgcctcgaatgcgcgttggggctcgctgtatgacgcgctgtatggcaccgacgccatcagcgaagccgacggcgccgagaagggccagggctacaacaaggtccgtggcgacaaggtgatcgccttcgcccgcgccttcctcgatgaggccgccccgcttagcgctggcagccatgtggagtcgaccggctacaagatcgttgatggcacgctgatcgtcagcctcaagggcggcagcaacagcggcctgcgcgacgatgcccagttgatcggctaccagggccctgcggccgagccgattgcgatcctgctgaaacacaacggcctgcacttcgaaatccagatcgacgccagcaccccggtcggccagaccgacgccgccggcgtcaaagacgtgctggtggaagccgcgctgaccaccatcatggactgcgaagactccgtcgctgccgtggatgccgacgacaaagtggtgatctaccgcaattggctcggcctgatgaagggcgacctggccgaagaagtggccaagggcggcaagaccttcacccgcaccatgaacgccgaccgcgtgtacaccggcgtaaatggccaggatgtgacgctgcatggccgttcgctgctgttcgtgcgcaacgtgggtcatctgatgaccatcgacgcgatcctcgacaaagacggcaacgaagtgcccgaaggcattctcgacgggctgatcaccagcctggccgcgatccacagcctcaacggcaacagcagccgcaagaacagccgcaccggttccgtgtacatcgtgaaaccgaagatgcacggcccggaagaagccgcgttcaccaacgagctgttcggtcgcatcgaagacgtgctgaagctgccgcgcaataccctgaaagtcgggatcatggacgaggaacgccgcaccacggtcaacctcaaggcctgcatcaaggccgccagcgagcgcgtggtgtttatcaacaccggtttcctcgaccgtaccggcgacgagatccacacctccatggaagccggcgcgatggtgcgcaaggcggcaatgaaggcggaaaaatggatcggcgcgtatgaaaactggaacgtcgatatcggcttgagcaccggcctgcaaggccgtgcgcagatcggtaaaggcatgtgggcgatgcccgacctgatggcggcgatgctcgaacagaaaatcgcccatccactggccggcgccaacaccgcgtgggtaccgtcgcctacggcggctgcgctgcacgtgttgcactaccacaaggtcgacgtattcgcccgccaggccgaattggccaagcgcgaacgcgcgtcggtggacgacatcctgaccattcccctggccagcaacactgattggtctgacgaagagatccgcaacgagctggacaacaacgcccaaggcatcctgggctatgtggtgcgctggatcgaccagggcgtcggctgttcgaaagtgccggacatcaacgatgtgggcctgatggaagaccgcgccaccctgcgtatctccagccagcacatcgccaactggctgcgccacggcatcgtcaacgaagcccaggtgatggaaagcctcaagcgcatggcgccggtggtagaccgtcagaatgccggggacaaactgtatcgcccactggcaccggacttcgacagcaacatcgcgttccaggcagcggtggagttggtgattgaagggaccaagcagccaaacgggtacaccgagccggtgctgcaccgtcggcgtcgggagttcaaggctaaaaacggcctgtaaatgaaaaagccctgatcgagagatcggggctttttctttggggttgtggtggctgaactggcgctatcgggggcaagccccctcccacaactgataggcggcgcagcacacaagtgggagggggcttgcccccgatgaggccgttatagacaccgcagaatcaggacgccatccccaactcgcgcttgaccatcttcgccaacttcacgctatcaatcggcttgagcaagaagtccaccacgctcaaatgcatcgcatcgatcacgtccggcgcttcggcgtcccccgacatgatgatgatcggcagcgctgcccgggtggattcacgcacttgtcggatcagttccaggccattgctgggcgccatgcgcaggtcggtgatcagcaaaccgatggagctgctggacttcaacaaatcccacgccgcctcaccactgtcggcggtcatgcagcgaatgccgtccagccccaggatttccgccagcagttcacgcgcgtccttgtcatcgtcaacaatcaacacgcgttgtggcggtaaatcaggctccagcatcacggcgctcagcgcctcgcgctcggcatcgctcaaaatatcgtggtcggacatacggttctcagcaattctcatctagctcccagcacactcgtcagacatctgcggaagggcgatcaatgtgcacttcgtcggaaagtttgactagtgggtgttctacggggtttggacgatagtcatgtaaggtttttccctagttctatggtgttttcagcgacctagacttacgtccaatgggcacccgctgcgcaggagtcgaccatgagggacgataacgacaaaaaaactgcggtcactgttatgagtaaagctgatgcctacgcccaggcggggaaaactgctgtactgcaaaatatccacggcaccctgcaattcctgcaacgtttcccgccgttcaaccagatggaaaacgcccacctggcgtttttggtggaacagtgccagttacgcttctacagccccggcgacagcatcctcaaaccgtcgggcggcccggtagagcatttttatatcgtcaagcagggccgcgtcgtgggcgagcggccggacagcgccgaaaccacctttgaaatcacgacgggcgaatgcttccccctggcagccctgctcggtgaacgggccacccgcaccgagcacaaggccgccgaagacaccttctgcctgcaactgaacaaaccggcgtttatcaagctgttcgcgctgtccagcccgtttcgcgactttgccctgcgcggcgtcagcagcctgttggaccaggtcaaccagcaagtgcagcaaaaggcggtggaaacccttggcactcaatactccctgaacactcgcctgggtgaattggccatgcgccacccggtaacgtgcagcccaaccacgccgctgcgcgaggccgtcacgctgatgcatgagcagcaggtgggcagcatcgtgatcgtcgatgaacacaaagcgcccctggggattttcaccctgcgtgacctgcgccaggtagtggccgatggcaccagcgatttcagccgggccattgaaggccatatgacccaggcgccgttcttcctgaccccggaccacagcgccttcgacgccgctatcgccatgaccgaacggcatatcgcccatgtgtgtctggtcaaggagcagcgcctgtgcggcgtggtgtccgagcgcgacctgttttccctgcaacgcgtggacctggtgcacctggcgcgcaccatccgcaacgcaccgcgggtagacaacctggtggcgattcgcggtgaaatcggtcaattggtggagcgcatgctggcccatggcgcgtcgtccacccagatcacccacattattaccctgctcaacgaccacaccgtgtgccgggtgatcgaactgaccctggccgaaaaaggcgaccccggtgtgccgttcagctggctgtgcttcggcagcgaaggccgccgcgaacagacgctgtacaccgaccaggacaacggcatcctgttcgatgccaaggacgccgccgaagcggccgagatacgtggtcggctgctgccactggcgcagcaaatcaatcagagcctggcgctctgtgggttcagcctgtgcaagggcaatatcatggccggcaacccggagttgtgcctgtcgcgagccgaatgggcgcggcgttttgcagcgtttatccgcgaggccacgccggagaatctgctgggttccagcatctatttcgacctgcgtgtggtgtggggcgatgaacgtggctgcgagcaactgcgccagggcattctggatcaggtcgcggacaaccggttgttccaacgcatgctggccgagaacgcattgcgccagcgcccgcctgtaggacgtttccgcgagtttgtgctgacccgtaaagggggcgagaaagccaccctcgacctcaaggtgcagggccttacgccgtttgtggacggcgcgcgcctactggccctggccaatggcatccacgccaacaacaccctggagcgcctgcgccaactggtggtcaaggaagtaatcgagcgcctggacggcgccgcctatgaagaggcctaccactttatccagcaaacccgcatgcagcagcaccagttgcagacccgcgagaaccagccgtattccaaccgtgtcgaccccgacagcctcaaccatctggaccggcgcatcctgcgggaatccctgcgccaggcccaacgcctgcaaagcagcctgacgttgcggtatcagctgtgagcttgttcaactggctgcgtacgaaaaagccggggctcgacagctcgcagcaacagcgcctggagcaactgtgcaagccttcgccgctaggcaaccaacctttgcccagccagcgctgggtcgtggtggacctggaaaccagcggcctgaacctcaatcgcgaccaggtgctgtccatcggcgcggtggtgatcgaggacggtgcggtggatttctcccagatgttcgaacgcaccctgcaacgcgccgagaccagactcagccccagcgtgctgatccacggcctcggccccagtgccattgccgccggcagcgacccggtggaggcgctgttggacttcatgggatttgtcggcgacagcccgttgctggcgttccatgcgccgttcgatcaacacatgctgtgccgggcgctcaaggacagcctgggttaccgcctggcccacccgttcctggacgtggccgacatcgcccctttgctgtgccccgacgcgcatatccgcgaggccgggctggacgactggatcaaccatttcaacctgcacgtgggcgaacgccatcatgccagcgccgatgccctggccacggcggagctgatgctcatcctgttcagccgcgcacgggcgcaacacatcgacacgccacaggcgctgcaagagcgcttgagccaatggaaacggcgtcaacacgcgcactctttttaacaccgctggtgggcgggcttactgtggcgagcgggcttgccccgcgttgggctgcgnnnnnnnnnnnnnnnnnnnnnnnnnnnnnnnnnnnnnnnnnnnnnnnnnnnnnnnnnnnnnnnnnncgcagcccaacgcggggcaagcccgctcgccacagaaagcccgttcgccacaagagcatccccccttcgaaccgacagacgccaattgcgtacactcgacggctctgacacaatcgcgaataattctcgttagtttaaacatcgcgtttaccaggtgatgccttgtcgtcgatccagaacccacgcagtgagcttgttggtgcgttgtatcgcgaccatcgtggctggctgttggcttggcttcgacgcaacgtggcctgcccaagccgcgccgaagacctgagccaggacaccttcatgcgcctgctcggccgtgatgagttgcgcgccccccgtgaaccccgtgcgtttctggtggcgatcgccaagggcttgttgttcgactacttccgccgcgccgccctggaacagacctacctcaccgaactgatgctgatcccggagagcgaacacccctcgccggaagaacagcaactgatcctcgaagacctcaaggccatcgaccgcctgctcggcaaactgtcgagcaaggcccgcgccgccttcctctataaccgcctcgacggcctgggccacgcggaaatcgcccagcgcctcggggtctcggtgccgcgggtgcgccagtacctggcccagggcattcgccagtgctacatcgcactgtacggcgagccgcagtgacggtgatcagttccaaaccggtctcggcccgcgtgctggatgccgcgattgcctggcagctgtcccttgattcaggtgacggcagcgccattgagcgcgaagagttcgataaatggctggccagcgatgaagagcacgcccgcgcgtggcgccaactgggcatgctcgaccagcggttcagcgtggcctcgggcccggcacgcgtagcgttgttgcaatcgcgcgacagcattcgccaacgcgttcgcaagctgggcagtgggctggcgagcattgcactggtgatcggcctggcgttgtttgccggcgagcgctatgtgccgatccactattggctggccgaccaacgcaccgccacgggtgaacagcgcacgctgaagctggcagacggtacggtgatcaacctcaatacccacagcgccatcgacgtgcgttttgatgaaaagcgccggctgatcgtgttgcaggaaggcgagatcctggtcgagaccggccataacgatgcgcgcccgttctatgtgcaaacccgcgacggcagcctgcgggcgctgggtacgcggtttatcgtcaagcgcgaaaacgacgccacgcgcttgagcgtgctgcaatcggcggtggctgcccagcccgaggcgctgcaccaggagcagattttcaaggaaggccagcaagtgctgatgcgcagcgacggcctcggcccactgctggccgttacccccgccaccgacgcctggacccgcggcatgctggtggtggacaacgcccgcctgggcgatgtgatcgaggaattgagccgctaccgcaccggttacctgggtgtggataaaaacgtggccgatttgcgcatcactggcagcttcccattgcgcgacaccacgctggcgcttaatgcgctgctgccgaccctgccggtgcagatcgagcagcacacgccgtggtgggtgacggttaagggcaagccttagttttagcggtgccttggctatcgctttcgcaggcaagccagctcccacacttgaccgcgttctacctgaaaaaacacggtcgaatgtgggagccgggcttgcccgcgaagaggcccgcaagcacaccttacgccccggggaaaaatattttcagcctgctctatcactttctgattctcgttcggcacataggcaattgcgaattacttccattcaggagccgccctatgtcccgcacgctagacaccttgttgcgccccagcctgttagccgtggccattgctctcagcgccccgctggtcagccctttgctgatcgccgccgagcaggcgtccagcgtgcgcgcctacaacttgccggcggcgccactggcgaccaccctcaaccagatcgccagccagggcggcctggcactgaccctcagcccggcgctggcatcgggcaagacctcggcgccggtccagggccagttcgacgcacccggtgcgctgcgtgaggcgttgcgtgggacgggcctgcagttggagcaaagcagtgcgggcacttacaccctggtgccggttccggaaggcgtcgtagcgttgccgaccaccaatatcaccggccaggacagctatgaaagcgcctggggcccggtcgacggttacctggccaagcgcaccgccgccggcaccaagactgacaccgcgttggtcgaggcgccgcgctcgatctcggttgcaacgcgccagcagatgcaggaccgcaacgtgcagaacctggatgacgcggttaaatacatgcccggcatcgtctccgccagctacggcagcgacacccgctacgactggatgcgtgtgcgcggcttcgaaccgacccagttcctcgacggcctgccgctgccacgcggtgtgtacgccaacccgaaagccgaaacctggaacctcgaccgcctcgccctgctgcgcggcccggcctcgtcgatctacggccagaccccaccgggcggcctgctggacatggtcagccgccgccccagtgccgagtcgagcaatgccgtacaggtgcaatacggcagcgacaactaccgccagatcaacttcgccagcaccggcaagatcgatgacgaaggccggttcctctatggcctcagcggcgtggtacgggatgccggcacccaggtcgatcatatcgacaacaagcgctacaaccttgcgccgagcctgacctggaacatcgacccggacaccaagctgaccttcctttcgcagttcacccgcgacgatacgggcaccaccagccagttcatgccgatccagggcaccaagatcaaatcgccgctgggcgaggtgtcccaccacaagaacctgggcgacccggactacgagttctacgaccgtacctactacgcgctgggctatgcgttcgagcatcgcttcaacgacatctggcagttcaagcagaacctgcgctacaccaagtccgagctggacttccaacagctgaccgtgggttcttatgccttctccccagcggatgcggcgggcaatatcagccggtcgaccaccaacgtgaatgaaagcatcggccagttcgcgctggacaacaacttccaggcggacttcgccaccggcgacatcacccacaccttgctgctcggcctggatcaccagcgcaccgataccacctatcgcgcgatctacggtacagcgtcgaatatcaacatcttcaacccggtcaatacccaaccgactgtgcgccctaccggcgtccgccctttttacgactacaaccagaagaccgtgcaaaccggcctctacgcgcaggaccagatggccctggaccaatggcgcctggccgtgggtgggcgtgaggactgggtgcatcagggcaccacctatttcaacgataacgatgcgaccaacaccgaccgcatcaagcacttcagtggcaacgcggcgctgagctatgtgttcgattcgggcttcgtgccgtacttgtcctacgccgaatccttccaaccggcgagcaacgccgacaccaatgccaccaagaccttcaagccgaccgaaggcaagcagtgggaaatgggcgtcaagtaccagccgcccggctccaacacgctgctgagtgcggcggtctacgacctgacccagaagaatgtgcaggtgaccaccctcggcgccggcggccagcaaatcaacagccagaccggcgaagtgaaggtcaagggcctggagctggaagccgtgtctgatgtgaccgagaacctcaaggtcatcgccgcctacaccctggcgaaatccgaggtgcaaaaaggcatctacaaaggcaaccgcctgaccttgatgccgaaccagcaagcctccctgtggaccgactacacctggcacaccggcctgctcgacggcttcggcatcggctttggcgcccgctacaccggcaacacctacggcgaccaggccaacacctggctgggcaaggccaacgcctacaccgtattcgacggcgcggtgcactacgacctcggccgcctggacaacagcctcaagggcgcatcggtcaagttgaacgccaccaacctgttcaacaaggactacctgtccacctgtgacggcaactactgctacttcggcgaccaacgcagcgtcgtcgccagcgccacctaccagtggtaatcagctgagttaaccgccgggccgcccaaggggcggctttggtgtgtctgaaggttgaaaacatgaaaagccaaaccatccgccgctggtccttcatccacacctggaccagcctgatctgcacggtattcctgctgctgctcgccctcaccggcctgccgctggtgtttcaccacgagatcgaccacctgctgggcaacgagccggaactggcgcagatgcccgccgatacgccgcagctcaacctcgagcagcttgtagccaaagcgcaggcccatcgccccggcgacgccatgcagtacctggcctgggacgaagacgacaagaacggtgtgatcgcaatcatggccgccaccgccggcaccgaacccaactcgtcgcacaccttcatgctcgacgcgcgcaccggcgaagccatggaaaccccggcggccaacggcggattcacgctgttcctgctgcgcttgcatgtggatatgttcgctggcctgccgggcaagttgctgctggcgttcatgggggttctgtttgtgctggcgatcatctccggcacggtgctgtacctgccgtttatgcgccgcctgaaattcgccactgtgcgtcaggacaaatccacccgcctgcgctggctcgacctgcacaacctgatcggcgtggtcaccctgacctgggcgctggtggtgggcgtgaccggggtaatcagcgcctgcgccgacctgatcatcgccgcctggcgccaggacagcctcagcgccatgatcgaaccctacaaaaacgccccacccctgacccaacgcgcaccggccaccgagctgttggcgattgccgccaaggccgcacccggcatggcgccggacttcatcgccttccccggcacacgcttttccagcgagcaccattacgcggtgttcatgaaaggtagcacccacctcacctcgcatttgctcacgccggtactgatcgacgccagcaccctggccgtcaccgccatcgccgaacgcccgtggtacatggacgccatgggcatgtcccaaccgctgcattttggcgattacggcggcatgccgatgaagatcctgtgggcggcgctggatgtgctgaccatcatcgtgctggtgagcgggatttacctgtggatcgtaaggcgccgagcatgaagccacgtcagtcgagtttctggaaggtctttgggattccgctggggatcggcctgctcagcgccgccgggttgtttgcagcgctgctcggcgatgggctgtgggattcgctcagttggctcgggttgggcattcccgctgcaattggcacttgggccttgctcaaacggtgagatagattagcgctgcccaatcagaggaatgcccatgtccgctcccagcatgaccttgttccacaaccccgcttcaccgtttgttcgtaaggttcgcgtgctgctggctgaaaccggccagcaggaccgcgtcgccctgcacggctgcatgccgaccccggtcaacccggatgcgcaggtggtgcaaggcaaccccgtgggcaagatcccggccctgcgcctggccgatggcacggtgctgcacgacagccgggtaatcctcgattacttcgaccaccaacacgtcggcaacccgctgatcccccgcgacggctcggcccgctggcgccgcctgaccctggcctcgatggccgacggcatcatggatgccgccgtgctggtgcgctacgaaaccgccctgcgcccggcagaaaaacactgggaccaatggctcgacgaacagcgcaacaagatccgtcgcaccctcgccgagctggaagccgacgcgattgccgagttggccagccatttcgatatcgccgccatcagcgtggcttgcgccctgggttacctcgacttccgccacccggatatgcaatggcgcctggacaacccgcagcttgccgcttggtacgcggaggtcagccagcgcccttcgatgctggaaacccagccaccgctttgacagtcactgtagtccggtgtgggagggggcttgcccccgatggcggtgggtcagctacaggtgaagtaacagacacactgcaatcgggggcaagccccctcccacactggccggtggcaaggttgagatagtcgatgatcctcgccttcatttgctgatcttcccgcaacccgatcattgcaccgcctccaggtcaaacatcaacggctcggccgccttgcgtttgcccacgccataccagtccaactttcgcgtcagtaccatcaccgtgcccagcaggccgaacagcagcaacgagcccatcagcaacgcgtagtcctcggcactcaacaacccgtacagcaagccatacaacgccgccagccccgccgaaaagcccaggccatgggcgacgctgcgcagcacgtggcacacatagaagccgatcaacaacacgcacgcactggccgagatcaggtaggccagggcgaagcctatgtgctcggacaacgacagcaacagcaggtagaagaacgccagcgcaaagcccaccaacgcgtactgcaccgggtgcaccgccaggctcttgagcacttcgaacaggaagaaaccggcaaaagtaagggcgataaacagcagcgcgtatttgatcgcacggtcgctcttgaggtactggtccaccgggtcgatgaagttcacaccgaagctgcggttgttgaagtcattgcagccctggccgtccaggcaggtttgcagggcctgttcgaggttggtggagaaaaatgaggtctgccagttggcggtaaaccccttgtcggtgacctcacgctgcaccggcaggaagttgccgataaagctggggtgcggccagttggaggcgagtgacacctggctggtcttgcccaccggcaccacttgcaattgttcggtgccttgcaggcgcaggtcgaaggcaaagtccacgacagagggctttttgctgtcctgctccggcagcgccacgtgcacgccttcacccagccagtccacctgggagcccggttcgaactccagctgctggctgcccagctccaacttcaacgcattctcgatgccgcgaatatcgctgatgcccaccgccagaaacgccggatcaaagcggtaatcggcaaagtcctcggtgatgcccagctgcgcaggcaattcgaagcgcccgctgatgcggttgtcggcatggaacagccgcgcctggtagatgccgcgtgaacgcagttcggtctgcaccttgccgtcgagttcaaaacggtccggcaggaaatacagacgaccacgctcttcacgggtgacttcgtagcgtttgttgagcttttcattgagcttccactcgcggacggtcttgcgatacggcaccaccatcaccgggccggtgaggcgctgggcgtagctggagctgcgggcgatgtccatcaggacgccgtcgcgcagttgctggcggtcgctgatgatgccgttgatcatcagcaacggaatcagcaacagcaggatcagcagcgcaatcgcgccaagtttgaaaagcaggctgcggttcatgggtctctccctgttttgatgggggagagtctgggcagcctgtgtgggagatttatgtgggcaatgtggagactgtatggagatgcagcaccacttgcacgccaccttgcacattaccgatctgcaacgcgccgccgtgcagcttcatcacttcctcgacaaagttgaggcccaggccggtgcttttgcgcccgctggccgggcgtggcagcgaatagaaccgttcgctcaggcgcggcagggcgtagtcgggaatcggcgcggcctggttgaacaggctcacctgcacgtcgttgtgccgggtctgcgcgctgaatttcaaggtgccgccaggcggtgtgaaatccagggcgttatccagcaggttgcccagggcctggcgcagcaggaagggttcgccgtacaccttcacatccgccgcaatcgtctgttcaacgtgcaatccggaaccttcgatccgcgcacattgcgccttgagcacatcatcgaccatggctgccagcaggatgctcacctgctcttccaggccctggcgttgctcgacctgcgccaggttcagcagacgttcgatcaactgctgcaggcgcgcactttcactgtcgatattgccgacgaagcgctgctgttgctcacgggtcatatcgccctgcaacagctctgccgcaccgcgtatcgcggccagcgggctcttcaattcgtgggtcagggtgtgcacgtagtgttcgacgtaggccttgccttccagttgcgtgcgcatgtgttcgacggcggtggacagctgtttgagttcgccgccacggtaatgcggcaactcggcgcgccggccctcgctgaccgcctcggcgtaggccgtcaagcgacgcagcgcaacgctcagccaccacgacagcagcgcgccgagcaacaggccgagaaccaccaggcccgcgccgtaccacagcaggcgccgctcggtgcggtcgacgtagggctgcaacgagctgttcggcttggccacggtgaccacgccgatgatctggccgttgtcacggatcggtgcgcccacgtgcatcaccgaggaagtggggtcatccagctcgctgcgtgtggagcgggcaccgtactcgccgcgcagggtcaggtacacatcgttccacttggaataatcctgccccaccgcttcgcccgtggagtcgagcagcacggtgcccttggcatcagtcacgtagatgcggtgattgacctggttcttcggcagcccccagatggtcgcgcccggctggcgattgccgtaggccttgagcagttcaggccagtggctttggccgagggtgccgttcttcacatcgtcgcgcaggatttcggccagcaggttggcggtgtccaccagggtttcttcggtggactggcgcacgccggggcgaatttccttcatcacggtgctgagcacgaagtagccggtcaggccgataaacagcgcgtacaccaggaaaatccgcagccccaggcgcatcagctgttgcctgggctgtagctgtagccaagaccgcgatgggtctggatcggctcggcgtcggcagccacattgcgtaacttgctgcgcaggcttttgatatggctgtcgatattgcgctcgtaaccggcatccgccgcgacgccgaccgcgtccaacagctgctcgcggctgaatacgcgctcgggttgttccaacaggctttgcaataggcggaattcgtgacgtgtgaggctcaacggctgaccgcgatacatgatctgcatgcgctccaggtctacctggaataccgccggcgcagcccctggaccaatccgcttgaggatcgccctgacccgcgccgtcacttcccgtgggctgaacggcttgaccacataatcgtcggcgccgatttccagccccaccacccggtcgatctcgccatcccgcgcgctgaggaacatcaccggcacttcgctgaaccggcgcagttgcttgcaggtttcaaacccggtgatgtccggcaggccaatgtcgaggatgatcagatcggccggcgtctggcgttgatgctccagcgcagcctggccgagtgtcagccaggtggtggtgaagccctcgccttgcagggcgaatatcagcgtgtcggctatcgccgcttcgtcttcgacaatcaggatgtggggcatggtggtccgtcagcagtccggtttgtcagcagtgtaacgacgcgccgggttgaccgcagcgccgaactcgcgcagagccttggcgccgatcagcagcgggtagttgaagctgctgcggtcggtgaggttgacctcgacggtgcgcttgacgtcgcccaggcacatttccaggtcgatcaccgggcgcttggccacggtggcttcgtccttgtcctcgtcctcgtcggcgcggctcttgatcttgctgatgcgcaagactttgtgttcgtagaccttattggacgcgtccttgccgccgaggcggaaacgcacccaatcgtcaccgtcacgggtgaaggtttggatgtcacgggccgacagcgaggcggtgagcgcgccggtgtccatcttggccttgaaggtttcgccgatctccggcagctggatgtattcgtagcgaccgtagagggtcggttcggcggccatgaccggcagggcagccagggccaaagaggcaaggagcagtttcacgaagtgatttcctcggaaagaagtaggcggattctagaccgcaaaagcgccggttagttagctcatcccaccatacccggcacattgtgaaacattcgtacggtgatttgcgatttggcctctagactcaccttgcttatgatggcccgcccacaagattccaagagttacttatgcgccgcctgctcaccggctgtctcgtcaccctgctgctcttgctcaacaccctcgtgctgttcggcccgttgatggtgtttgccctgctcaagctggtagccccggggcgcttgcgtgactacatgtcatgggcggtaatgtggatcgccgagacctgggccgagatcgacaagctgattttctcgctgtgcatcccgacccagtgggacattcgcggcggcggcgatctgcggggtgacaccagttacctggtgatcagcaaccaccagtcctgggtggatatcccggccttgatccaggccctcaaccgccgtacgccgttcttcaaattcttcctgaaaaaagagctgatctgggtgcccttcctgggcctggcctggtgggcgctggattacccgttcatgaagcgctacaccaaggcgttcctggccaagcatcccgaactggcggggcaggatttgaagatcaccaaagaggcctgcgagctgttcaagcgccagccagtgacggtggtcaattatctggaaggcacgcggttcagcgacgccaagcgcaggcagcagggttcacccttcaaccgcttgctcaagcccaaggcgggcggcgtggcgtttgtgctggcggcgatgggcgagcaactggatgcggtgctggacgtgacggtggtgtatccgcagcaaaagattccggggttctgggctttgatcagcggttcggtaccgaaggtgatcattgatatccgcacccgcgaactggacccggcgctatggcaaggggactacgagaacgatccggcatttcgccagactgtccagagctgggtgaaccagctctggcaggagaaggatcagcgcattcagctattgctcaagtaatacggcatggcgtcgttcaggtgccccaccatcccgataaaatgctttggcgccttcgagcgcagctttgagactggcaatcaagtcagcatcagaggtgtttaccgcgccatcgagcttcaggaacgctttcgctaccgcagccaggcgttcaagatcggccggctcaaggcctttttcggaagcttcggctttgaggaaatccctcatgctggaaagcatctcgtctccgcccaaggagttggtagtgctatcagccaccgctttcttgtaagcggcaacgaatttctccgactcctcgttcgtcggcgcttttatgcccgcgaacaatgcattggcacccagcggaaaattcgatttttgctcagattgagtgtgttccacaaaacgtcgaagatccgaaagcagttgcttgagttgcaagtccggcttcttgctgctccctgccacctcccaggcattgcgtatatcctggatcaacccggacggcagggtgaggccttgccgggccacacgaaccgctgcctgggcctgctcgaaagaaataccggaagacattgggaactgtgaattaatctgagtcattggagcaccatttcggtcagttgaagagtctctcaaataccgctcttagcgattgatgagagagttcttattaggtggccactcaacctcccacagttcccagcgctatatcacaggatattacgcagtcagtcgtccttccaacacagacgaagacgataccaatagaggaatacacgagcacagtgaccgcgcatcctcgtaagcccccccgcactggatgagcccgccacggagaggcaaaaaggcatgctgaacatccgtcagttgccagtgccccaggccgaggccaatttacccagcaatgactggttcgcaccctggccacccaagtattgcaggatcaccggcgcaaactggccgaccatgccactgtccatgcccagggcgctgaacgcagtgttcaggtcgttggtgttcttcacattgcccagcaggccgtcgaggccgctggtcttgctaccgccagcctggccgagcatcccgctcaaggccccgaggctgcccaacgcattattgcccgacagttggtcgaggcccggcacactattgcccagttgcgaatagtcgttgccgctcaatttgttcttggccaggcccagcatggcgcccgtaccgccgaccgcttgctcgggggtgatgttcagttgcgaggtcagggcgctcaacaggccggccgtctcggacgacggtgcagcagcggctgccttgttgttaccaccctgcatgccggaaatggcattggccgcgtcgccaaggctgaaccctgcggcgagcaccgggccggctgccagggtcatcaggcaggaaagggcgaaaccgcgtgaaatcttcatcgaaacaacctctgggtgtaggagctaaaagcaggcgtttgactgacagtccggaacgattgttcccacaccaaggttagttcagatttttctgcatccgaatcgcctcggcccgcgtatagcctgcatacgccactcggagttggatggaatgaatgcccaggctgaactaccctccgcttaccgcgtgcagtcccgtcaccctcgaacgagggtctggagaagctctattagcgccgatgatgctgacccattgcgccctttgctggcgcaatgtgccttaggtaaccgccaggcattcgaaaccctctaccgcagcgtttcgccgcgcctgcacggtgtagccctgcgtttcatgggccgccgggacctggccgaagaggtgttgcaggaagccttcgtgcgtatctggtacaacgcctcccgctacgaggcgcacctgtctgcgccgatgacctggatggtgaatatcacccgcaacctggccatcgatcaattgcgcaagcaccgtgaacagccgctggcagagggtcagcaagacgccttgctcgatgacgcccccagtgctcacgaccaactcgacaacgaacgccaagcccgcgccttgaaccgttgcctggacaccctcgacggcatgcaacgccagtcgatcagcgtggcttacttccagggcctgtcgtgctcggaattggccgaacacttggccgcgcccctgggctcggtcaaatcctggattcgtcgcggcatggaacgcctgcgcaggtgccttgaatcatgaactaccagaccaccgccctgcgccgcgccctcgccgccgactacgccgtcgggctgatgcccgccaccgcgcgccggcgttttgatgcgctgcttctggaggatgccgcactgcgcgtggaactcggccattggcaggacgcgctcgccagcctgaccggtgccttgcccgagcgagcggtgccggcgcatgtctgggaaggcatcaaggcacgcatagagccgcaggtgctgcatgtgccggcgaaaaaaccgttctggatgaacctgcgcctgcaggcggcggcgtttggcatcgtcattgccgtgctggtgggcgtgctctaccagcgcgacctgggaatggaatacaacgccacgctggtcgccgccaaccagcaaccggcgctgcagatcaaggcgtttgccgaccacctacaagtcgagccgctgacattggccgctcttgagccggcacgcgccctggaactgtgggccattcctgccgggggcaagccgatatcactgggcctggtgccagtggcgggcaaaggtcgaatcgcgttgaacaaaacgcagcaggcgctgctgaaaacaccgctgaccctcgccgtcagcctggagccacaagggggctcgccgacaggtcaaccgaccgggccggtgttgtatcagggtcaattggcatcactttgaggtgagatggcgccaggaacccggcgcgcagactgttagatctgtgggagggcttgcccctcccacatctggaacgcggtatcccggggatttaagccgcgctgaagagtttgtgcggatcaatcacaaacttcttcggcacacccgcatcgaactcgccatacccacgcggcgcatcatccaggctgatcacctgcacacccacgatttcggcaatgttgatacggtcccacatgatcgcctgcatcagctggcggttgtacttcatcaccggcgtttgcccggtgtggaagctgtgggattttgcccaacccaggccaaagcgaatgctcaggctgcccatttttgcggcggcgtccacggcacccggatcttcggtgacgtacaggccagggataccgatcttgcccgccacgcgcactacgcccatcagcgagttgagtacggtggccggcgcttccgccttgaccccttcatgaccatggccacgggcttcaaagcccacggcatcgacggcgcagtccacttccggctcgcccagcagtgcggcgatctgttcgtgcagcggggtgtccttggacaggtcggcaatctcgaagccctgggccttggcgtgggccaggcggaccgggttgacgtcgccgataatcaccacggcagcgcccagcaagcgggcggaagcggcagccgccaggcccacaggaccggcaccggcgatgtagaccgtactgcctgggccaacgccggcagtgacggcgccgtggtagccggtcgggagaatgtcggagaggcaggtcaggtcgcggattttttccatggccttgtcgcgatccggcagtttgagcaggttgaagtcggcgtacggcaccagtacgtattcggcctggccgccggtccagtcacccatgtcgacatagccgtaggcgccaccggcacgggccgggttgacggtcaggcacacgccagtgtgttgctctttgcatgagcggcagcggccgcaggctacgttgaacggtacggaaaccaggtcgccgattttcaggttctcgacgtcgctgcccttctcgatcacttcaccggtaatttcatgaccgagcaccaggccggtctgggcagtggtacggccacgcaccatgtgttggtcggagccgcagatgttggtggagaccacgcgcaggatgacgccgtgctcgatcttcctgccacgggggtcctgcattttgggatagtcgattttctgtacttcgaccttgccgttgccgagatacacgacaccacgattaccagacatgctttcacctcgctgttgtttttatggaactgcgttgcccgttgggtgggcagcgcgtttaagtgctcgggtacagatgctgttcttgcgttgtttgtgagggcctcatcgggggcaagccccctcccacattcgaccgcattccaaaggtgggagggggcttgcc

SEQ ID NO: 58 - DNA, 1664 bp, Pseudomonas nodulensis
caagccccctcccacattcgaccgcattccaaaggtgggagggggcttgcccccgatagcgtcagtcagagcaccaccgtccgattggcgttcaaaaacacccgccgctcaatgtgataccccaccgcccgggccaacgtcagcccttcgatatcccgccccttggcaatcaagtcctcgggatagtggctgtgatccaccacctccacgccctgggcgatgatcgggccttcgtccaggtcgttgttgatgtaatgcgccgtggcgcctaccagcttcacgcccttgttgtacgcctggtgatacggcttggcgcccttgaaccccggcaacaacgagtggtgaatattgatggccttgccatccagcttgcggcacagctccggcgacagcacttgcatgtagcgcgcaagaatcaccaattcggcgccggtgtcttccaccacttgccacacctgacgctcctgggacggtttatcgttggggtcgagggggaaatggtagtagggaatctggtgccagtcggccaacggtttcagatcggggtgattggacaccaccgcgaccacgtccatcggcagctggccgatgcgctggcggtacagcaggtcgttgaggcagtgatcggccttggagaccatgatcaccacttttggccggtagttcggcgccgtcagctcgaagatcatgccgaaggcttcaccccgcgtggccaggccatcgcggaacgcctgctcgtcaaaaccgtcgggctggcggaattccacgcggataaagaaccggcccgaaagccgatcatcgaacgagtgatgctcagtgacgtagcaaccctgttcgaacaggtagcgggtgaccgcgtccaccgtgccgagcacgctggggcagtcggcggtcaaaatccatgtatcaggtgcgcggctcatggggtattcctcaggcttggacgctcaggccgaattcggcggatgcatcctgcagccacaaccaccagtaatccgagaagctgcgacgaatcaccagctcccaagtgtcttcagccgtgtggcggatcaccagttgcgacttggcgaacaccgtgcccaccgccttgcccaccgggaagttgttggggtgcacgtcgtagctggtggacttcatcagcacatcgcgcacgttcgggccgctgagttcgaggatctgctggccgccgctgacattgacgacctggatatgcaggtcgcccagggcggcgcgcaggttttgctcggcggcgaattcttcaccgctcggcacgatcagcaaccactcatccgggccgagccattgcaggctggtttcgcccttgacgatcacttgcagggctcccggcaactcgatgccgacagctttgtgcacgccggcggcgaaggctgcgtcatggccgtcgccacgaatagtcaggtggcccaggagtttcttttcacgcacggtcacaccggcgttcttgcggcccttgccgaccaggctggcgaggtcggcatggtgcagcgacgactcggccttggcgccggaggtggggcgttgttggtaaacattggctgctgtcataaagcacctgttctaaatgctgtggtgtctgttctggcctcatcgggggcaagccccctcccacaggggaatgcatttcaacatgtgggagggggctt
